United States Patent Application Publication US 2026/0234583 A1 - sequence listing, part 2

SEQ ID NO: 11870 - DNA, 20 bp, Homo sapiens
  source 1..20: mol_type = genomic DNA; note = Gene: PXDN; note = Location (start to end; relative to TSS): PXDN_47_77; note = Orientation (relative to transcription): antisense; note = sgRNA Position: 1744464; note = Sequence Name: 56322-704_101_SL_seq_11870
cttggccatggccgacggcg

SEQ ID NO: 11871 - DNA, 20 bp, Homo sapiens
  source 1..20: mol_type = genomic DNA; note = Gene: PXDN; note = Location (start to end; relative to TSS): PXDN_96_126; note = Orientation (relative to transcription): sense; note = sgRNA Position: 1744395; note = Sequence Name: 56322-704_101_SL_seq_11871
gctcgtgctgttctgcgcct

SEQ ID NO: 11872 - DNA, 20 bp, Homo sapiens
  source 1..20: mol_type = genomic DNA; note = Gene: PXDN; note = Location (start to end; relative to TSS): PXDN_43_73; note = Orientation (relative to transcription): antisense; note = sgRNA Position: 1744468; note = Sequence Name: 56322-704_101_SL_seq_11872
gccatggccgacggcgcgga

SEQ ID NO: 11873 - DNA, 20 bp, Homo sapiens
  source 1..20: mol_type = genomic DNA; note = Gene: PXDN; note = Location (start to end; relative to TSS): PXDN_90_120; note = Orientation (relative to transcription): antisense; note = sgRNA Position: 1744421; note = Sequence Name: 56322-704_101_SL_seq_11873
gcacgagcgccaacaggcag

SEQ ID NO: 11874 - DNA, 20 bp, Homo sapiens
  source 1..20: mol_type = genomic DNA; note = Gene: PXDN; note = Location (start to end; relative to TSS): PXDN_33_63; note = Orientation (relative to transcription): sense; note = sgRNA Position: 1744458; note = Sequence Name: 56322-704_101_SL_seq_11874
tccgtccgcgccgtcggcca

SEQ ID NO: 11875 - DNA, 20 bp, Homo sapiens
  source 1..20: mol_type = genomic DNA; note = Gene: PXDN; note = Location (start to end; relative to TSS): PXDN_81_111; note = Orientation (relative to transcription): antisense; note = sgRNA Position: 1744430; note = Sequence Name: 56322-704_101_SL_seq_11875
ccaacaggcagcggcgcccg

SEQ ID NO: 11876 - DNA, 20 bp, Homo sapiens
  source 1..20: mol_type = genomic DNA; note = Gene: PXDN; note = Location (start to end; relative to TSS): PXDN_35_65; note = Orientation (relative to transcription): antisense; note = sgRNA Position: 1744476; note = Sequence Name: 56322-704_101_SL_seq_11876
cgacggcgcggacggacgct

SEQ ID NO: 11877 - DNA, 20 bp, Homo sapiens
  source 1..20: mol_type = genomic DNA; note = Gene: PXDN; note = Location (start to end; relative to TSS): PXDN_72_102; note = Orientation (relative to transcription): sense; note = sgRNA Position: 1744419; note = Sequence Name: 56322-704_101_SL_seq_11877
ccccgggcgccgctgcctgt

SEQ ID NO: 11878 - DNA, 20 bp, Homo sapiens
  source 1..20: mol_type = genomic DNA; note = Gene: PXDN; note = Location (start to end; relative to TSS): PXDN_27_57; note = Orientation (relative to transcription): antisense; note = sgRNA Position: 1744484; note = Sequence Name: 56322-704_101_SL_seq_11878
cggacggacgctcggacgca

SEQ ID NO: 11879 - DNA, 20 bp, Homo sapiens
  source 1..20: mol_type = genomic DNA; note = Gene: PXDN; note = Location (start to end; relative to TSS): PXDN_59_89; note = Orientation (relative to transcription): antisense; note = sgRNA Position: 1744452; note = Sequence Name: 56322-704_101_SL_seq_11879
gcccctggagcgcttggcca

SEQ ID NO: 11880 - DNA, 20 bp, Homo sapiens
  source 1..20: mol_type = genomic DNA; note = Gene: PXDNL; note = Location (start to end; relative to TSS): PXDNL_52_82; note = Orientation (relative to transcription): sense; note = sgRNA Position: 51809369; note = Sequence Name: 56322-704_101_SL_seq_11880
cctccggctgcttcttcgcg

SEQ ID NO: 11881 - DNA, 20 bp, Homo sapiens
  source 1..20: mol_type = genomic DNA; note = Gene: PXDNL; note = Location (start to end; relative to TSS): PXDNL_84_114; note = Orientation (relative to transcription): antisense; note = sgRNA Position: 51809357; note = Sequence Name: 56322-704_101_SL_seq_11881
tccatcgctccattcgctgc

SEQ ID NO: 11882 - DNA, 20 bp, Homo sapiens
  source 1..20: mol_type = genomic DNA; note = Gene: PXDNL; note = Location (start to end; relative to TSS): PXDNL_36_66; note = Orientation (relative to transcription): sense; note = sgRNA Position: 51809385; note = Sequence Name: 56322-704_101_SL_seq_11882
tgcagctgctgctctccctc

SEQ ID NO: 11883 - DNA, 20 bp, Homo sapiens
  source 1..20: mol_type = genomic DNA; note = Gene: PXDNL; note = Location (start to end; relative to TSS): PXDNL_66_96; note = Orientation (relative to transcription): sense; note = sgRNA Position: 51809355; note = Sequence Name: 56322-704_101_SL_seq_11883
ttcgcgtggccagcagcgaa

SEQ ID NO: 11884 - DNA, 20 bp, Homo sapiens
  source 1..20: mol_type = genomic DNA; note = Gene: PXDNL; note = Location (start to end; relative to TSS): PXDNL_23_53; note = Orientation (relative to transcription): antisense; note = sgRNA Position: 51809418; note = Sequence Name: 56322-704_101_SL_seq_11884
agctgcagcagcaaccgcag

SEQ ID NO: 11885 - DNA, 20 bp, Homo sapiens
  source 1..20: mol_type = genomic DNA; note = Gene: PXDNL; note = Location (start to end; relative to TSS): PXDNL_61_91; note = Orientation (relative to transcription): antisense; note = sgRNA Position: 51809380; note = Sequence Name: 56322-704_101_SL_seq_11885
ccacgcgaagaagcagccgg

SEQ ID NO: 11886 - DNA, 20 bp, Homo sapiens
  source 1..20: mol_type = genomic DNA; note = Gene: PXDNL; note = Location (start to end; relative to TSS): PXDNL_20_50; note = Orientation (relative to transcription): antisense; note = sgRNA Position: 51809421; note = Sequence Name: 56322-704_101_SL_seq_11886
tgcagcagcaaccgcagtgg

SEQ ID NO: 11887 - DNA, 20 bp, Homo sapiens
  source 1..20: mol_type = genomic DNA; note = Gene: PXDNL; note = Location (start to end; relative to TSS): PXDNL_60_90; note = Orientation (relative to transcription): antisense; note = sgRNA Position: 51809381; note = Sequence Name: 56322-704_101_SL_seq_11887
cacgcgaagaagcagccgga

SEQ ID NO: 11888 - DNA, 20 bp, Homo sapiens
  source 1..20: mol_type = genomic DNA; note = Gene: PXDNL; note = Location (start to end; relative to TSS): PXDNL_14_44; note = Orientation (relative to transcription): antisense; note = sgRNA Position: 51809427; note = Sequence Name: 56322-704_101_SL_seq_11888
agcaaccgcagtggtggtga

SEQ ID NO: 11889 - DNA, 20 bp, Homo sapiens
  source 1..20: mol_type = genomic DNA; note = Gene: PXDNL; note = Location (start to end; relative to TSS): PXDNL_52_82; note = Orientation (relative to transcription): sense; note = sgRNA Position: 51809369; note = Sequence Name: 56322-704_101_SL_seq_11889
cctccggctgcttcttcgcg

SEQ ID NO: 11890 - DNA, 20 bp, Homo sapiens
  source 1..20: mol_type = genomic DNA; note = Gene: ROBO1; note = Location (start to end; relative to TSS): ROBO1_65_95; note = Orientation (relative to transcription): antisense; note = sgRNA Position: 79767929; note = Sequence Name: 56322-704_101_SL_seq_11890
tcttctctgtatcagcaccc

SEQ ID NO: 11891 - DNA, 20 bp, Homo sapiens
  source 1..20: mol_type = genomic DNA; note = Gene: ROBO1; note = Location (start to end; relative to TSS): ROBO1_95_125; note = Orientation (relative to transcription): sense; note = sgRNA Position: 79767879; note = Sequence Name: 56322-704_101_SL_seq_11891
ctccctatttccccactctt

SEQ ID NO: 11892 - DNA, 20 bp, Homo sapiens
  source 1..20: mol_type = genomic DNA; note = Gene: ROBO1; note = Location (start to end; relative to TSS): ROBO1_38_68; note = Orientation (relative to transcription): sense; note = sgRNA Position: 79767936; note = Sequence Name: 56322-704_101_SL_seq_11892
aagaaggattgaatttttcc

SEQ ID NO: 11893 - DNA, 20 bp, Homo sapiens
  source 1..20: mol_type = genomic DNA; note = Gene: ROBO1; note = Location (start to end; relative to TSS): ROBO1_91_121; note = Orientation (relative to transcription): antisense; note = sgRNA Position: 79767903; note = Sequence Name: 56322-704_101_SL_seq_11893
aaatagggagagagtgaagt

SEQ ID NO: 11894 - DNA, 20 bp, Homo sapiens
  source 1..20: mol_type = genomic DNA; note = Gene: ROBO1; note = Location (start to end; relative to TSS): ROBO1_39_69; note = Orientation (relative to transcription): sense; note = sgRNA Position: 79767935; note = Sequence Name: 56322-704_101_SL_seq_11894
agaaggattgaatttttcca

SEQ ID NO: 11895 - DNA, 20 bp, Homo sapiens
  source 1..20: mol_type = genomic DNA; note = Gene: ROBO1; note = Location (start to end; relative to TSS): ROBO1_90_120; note = Orientation (relative to transcription): antisense; note = sgRNA Position: 79767904; note = Sequence Name: 56322-704_101_SL_seq_11895
aatagggagagagtgaagtc

SEQ ID NO: 11896 - DNA, 20 bp, Homo sapiens
  source 1..20: mol_type = genomic DNA; note = Gene: ROBO1; note = Location (start to end; relative to TSS): ROBO1_22_52; note = Orientation (relative to transcription): sense; note = sgRNA Position: 79767952; note = Sequence Name: 56322-704_101_SL_seq_11896
aaagaattctctactgaaga

SEQ ID NO: 11897 - DNA, 20 bp, Homo sapiens
  source 1..20: mol_type = genomic DNA; note = Gene: ROBO1; note = Location (start to end; relative to TSS): ROBO1_65_95; note = Orientation (relative to transcription): antisense; note = sgRNA Position: 79767929; note = Sequence Name: 56322-704_101_SL_seq_11897
tcttctctgtatcagcaccc

SEQ ID NO: 11898 - DNA, 20 bp, Homo sapiens
  source 1..20: mol_type = genomic DNA; note = Gene: ROBO1; note = Location (start to end; relative to TSS): ROBO1_-5_25; note = Orientation (relative to transcription): sense; note = sgRNA Position: 79767979; note = Sequence Name: 56322-704_101_SL_seq_11898
ttaatagtaatacagataac

SEQ ID NO: 11899 - DNA, 20 bp, Homo sapiens
  source 1..20: mol_type = genomic DNA; note = Gene: ROBO1; note = Location (start to end; relative to TSS): ROBO1_38_68; note = Orientation (relative to transcription): sense; note = sgRNA Position: 79767936; note = Sequence Name: 56322-704_101_SL_seq_11899
aagaaggattgaatttttcc

SEQ ID NO: 11900 - DNA, 20 bp, Homo sapiens
  source 1..20: mol_type = genomic DNA; note = Gene: ROBO2; note = Location (start to end; relative to TSS): ROBO2_40_70; note = Orientation (relative to transcription): antisense; note = sgRNA Position: 77040145; note = Sequence Name: 56322-704_101_SL_seq_11900
ggtttccaaaagagaggaga

SEQ ID NO: 11901 - DNA, 20 bp, Homo sapiens
  source 1..20: mol_type = genomic DNA; note = Gene: ROBO2; note = Location (start to end; relative to TSS): ROBO2_86_116; note = Orientation (relative to transcription): antisense; note = sgRNA Position: 77040191; note = Sequence Name: 56322-704_101_SL_seq_11901
ggcgggcctctcctttgcag

SEQ ID NO: 11902 - DNA, 20 bp, Homo sapiens
  source 1..20: mol_type = genomic DNA; note = Gene: ROBO2; note = Location (start to end; relative to TSS): ROBO2_31_61; note = Orientation (relative to transcription): antisense; note = sgRNA Position: 77040136; note = Sequence Name: 56322-704_101_SL_seq_11902
aagagaggagaagggaaatc

SEQ ID NO: 11903 - DNA, 20 bp, Homo sapiens
  source 1..20: mol_type = genomic DNA; note = Gene: ROBO2; note = Location (start to end; relative to TSS): ROBO2_71_101; note = Orientation (relative to transcription): sense; note = sgRNA Position: 77040196; note = Sequence Name: 56322-704_101_SL_seq_11903
gcaacaccgctgcaaaggag

SEQ ID NO: 11904 - DNA, 20 bp, Homo sapiens
  source 1..20: mol_type = genomic DNA; note = Gene: ROBO2; note = Location (start to end; relative to TSS): ROBO2_22_52; note = Orientation (relative to transcription): antisense; note = sgRNA Position: 77040127; note = Sequence Name: 56322-704_101_SL_seq_11904
gaagggaaatcaggacgatt

SEQ ID NO: 11905 - DNA, 20 bp, Homo sapiens
  source 1..20: mol_type = genomic DNA; note = Gene: ROBO2; note = Location (start to end; relative to TSS): ROBO2_66_96; note = Orientation (relative to transcription): sense; note = sgRNA Position: 77040191; note = Sequence Name: 56322-704_101_SL_seq_11905
ggagggcaacaccgctgcaa

SEQ ID NO: 11906 - DNA, 20 bp, Homo sapiens
  source 1..20: mol_type = genomic DNA; note = Gene: ROBO2; note = Location (start to end; relative to TSS): ROBO2_21_51; note = Orientation (relative to transcription): antisense; note = sgRNA Position: 77040126; note = Sequence Name: 56322-704_101_SL_seq_11906
aagggaaatcaggacgattc

SEQ ID NO: 11907 - DNA, 20 bp, Homo sapiens
  source 1..20: mol_type = genomic DNA; note = Gene: ROBO2; note = Location (start to end; relative to TSS): ROBO2_61_91; note = Orientation (relative to transcription): antisense; note = sgRNA Position: 77040166; note = Sequence Name: 56322-704_101_SL_seq_11907
ttgccctccctccacctctc

SEQ ID NO: 11908 - DNA, 20 bp, Homo sapiens
  source 1..20: mol_type = genomic DNA; note = Gene: ROBO2; note = Location (start to end; relative to TSS): ROBO2_18_48; note = Orientation (relative to transcription): antisense; note = sgRNA Position: 77040123; note = Sequence Name: 56322-704_101_SL_seq_11908
ggaaatcaggacgattcggg

SEQ ID NO: 11909 - DNA, 20 bp, Homo sapiens
  source 1..20: mol_type = genomic DNA; note = Gene: ROBO2; note = Location (start to end; relative to TSS): ROBO2_48_78; note = Orientation (relative to transcription): sense; note = sgRNA Position: 77040173; note = Sequence Name: 56322-704_101_SL_seq_11909
gaaaccggagaggtggaggg

SEQ ID NO: 11910 - DNA, 20 bp, Homo sapiens
  source 1..20: mol_type = genomic DNA; note = Gene: ROBO3; note = Location (start to end; relative to TSS): ROBO3_41_71; note = Orientation (relative to transcription): sense; note = sgRNA Position: 124865499; note = Sequence Name: 56322-704_101_SL_seq_11910
agaggctgtggaggggctta

SEQ ID NO: 11911 - DNA, 20 bp, Homo sapiens
  source 1..20: mol_type = genomic DNA; note = Gene: ROBO3; note = Location (start to end; relative to TSS): ROBO3_71_101; note = Orientation (relative to transcription): sense; note = sgRNA Position: 124865529; note = Sequence Name: 56322-704_101_SL_seq_11911
cccacgggtctcagacccag

SEQ ID NO: 11912 - DNA, 20 bp, Homo sapiens
  source 1..20: mol_type = genomic DNA; note = Gene: ROBO3; note = Location (start to end; relative to TSS): ROBO3_30_60; note = Orientation (relative to transcription): antisense; note = sgRNA Position: 124865468; note = Sequence Name: 56322-704_101_SL_seq_11912
tctgcgcgctgcggcagcca

SEQ ID NO: 11913 - DNA, 20 bp, Homo sapiens
  source 1..20: mol_type = genomic DNA; note = Gene: ROBO3; note = Location (start to end; relative to TSS): ROBO3_70_100; note = Orientation (relative to transcription): sense; note = sgRNA Position: 124865528; note = Sequence Name: 56322-704_101_SL_seq_11913
gcccacgggtctcagaccca

SEQ ID NO: 11914 - DNA, 20 bp, Homo sapiens
  source 1..20: mol_type = genomic DNA; note = Gene: ROBO3; note = Location (start to end; relative to TSS): ROBO3_39_69; note = Orientation (relative to transcription): antisense; note = sgRNA Position: 124865477; note = Sequence Name: 56322-704_101_SL_seq_11914
tccacagcctctgcgcgctg

SEQ ID NO: 11915 - DNA, 20 bp, Homo sapiens
  source 1..20: mol_type = genomic DNA; note = Gene: ROBO3; note = Location (start to end; relative to TSS): ROBO3_69_99; note = Orientation (relative to transcription): sense; note = sgRNA Position: 124865527; note = Sequence Name: 56322-704_101_SL_seq_11915
agcccacgggtctcagaccc

SEQ ID NO: 11916 - DNA, 20 bp, Homo sapiens
  source 1..20: mol_type = genomic DNA; note = Gene: ROBO3; note = Location (start to end; relative to TSS): ROBO3_23_53; note = Orientation (relative to transcription): sense; note = sgRNA Position: 124865481; note = Sequence Name: 56322-704_101_SL_seq_11916
gtggctgccgcagcgcgcag

SEQ ID NO: 11917 - DNA, 20 bp, Homo sapiens
  source 1..20: mol_type = genomic DNA; note = Gene: ROBO3; note = Location (start to end; relative to TSS): ROBO3_56_86; note = Orientation (relative to transcription): sense; note = sgRNA Position: 124865514; note = Sequence Name: 56322-704_101_SL_seq_11917
gcttacggctcccagcccac

SEQ ID NO: 11918 - DNA, 20 bp, Homo sapiens
  source 1..20: mol_type = genomic DNA; note = Gene: ROBO3; note = Location (start to end; relative to TSS): ROBO3_13_43; note = Orientation (relative to transcription): antisense; note = sgRNA Position: 124865451; note = Sequence Name: 56322-704_101_SL_seq_11918
ccacggtgccgctctcctgc

SEQ ID NO: 11919 - DNA, 20 bp, Homo sapiens
  source 1..20: mol_type = genomic DNA; note = Gene: ROBO3; note = Location (start to end; relative to TSS): ROBO3_55_85; note = Orientation (relative to transcription): sense; note = sgRNA Position: 124865513; note = Sequence Name: 56322-704_101_SL_seq_11919
ggcttacggctcccagccca

SEQ ID NO: 11920 - DNA, 20 bp, Homo sapiens
  source 1..20: mol_type = genomic DNA; note = Gene: ROBO4; note = Location (start to end; relative to TSS): ROBO4_43_73; note = Orientation (relative to transcription): sense; note = sgRNA Position: 124897798; note = Sequence Name: 56322-704_101_SL_seq_11920
catagggctgagagtagcca

SEQ ID NO: 11921 - DNA, 20 bp, Homo sapiens
  source 1..20: mol_type = genomic DNA; note = Gene: ROBO4; note = Location (start to end; relative to TSS): ROBO4_77_107; note = Orientation (relative to transcription): sense; note = sgRNA Position: 124897764; note = Sequence Name: 56322-704_101_SL_seq_11921
gacagcctcctggggggcag

SEQ ID NO: 11922 - DNA, 20 bp, Homo sapiens
  source 1..20: mol_type = genomic DNA; note = Gene: ROBO4; note = Location (start to end; relative to TSS): ROBO4_44_74; note = Orientation (relative to transcription): sense; note = sgRNA Position: 124897797; note = Sequence Name: 56322-704_101_SL_seq_11922
atagggctgagagtagccat

SEQ ID NO: 11923 - DNA, 20 bp, Homo sapiens
  source 1..20: mol_type = genomic DNA; note = Gene: ROBO4; note = Location (start to end; relative to TSS): ROBO4_76_106; note = Orientation (relative to transcription): sense; note = sgRNA Position: 124897765; note = Sequence Name: 56322-704_101_SL_seq_11923
agacagcctcctggggggca

SEQ ID NO: 11924 - DNA, 20 bp, Homo sapiens
  source 1..20: mol_type = genomic DNA; note = Gene: ROBO4; note = Location (start to end; relative to TSS): ROBO4_26_56; note = Orientation (relative to transcription): sense; note = sgRNA Position: 124897815; note = Sequence Name: 56322-704_101_SL_seq_11924
agtgctcgggacaaggacat

SEQ ID NO: 11925 - DNA, 20 bp, Homo sapiens
  source 1..20: mol_type = genomic DNA; note = Gene: ROBO4; note = Location (start to end; relative to TSS): ROBO4_68_98; note = Orientation (relative to transcription): sense; note = sgRNA Position: 124897773; note = Sequence Name: 56322-704_101_SL_seq_11925
tctggaggagacagcctcct

SEQ ID NO: 11926 - DNA, 20 bp, Homo sapiens
  source 1..20: mol_type = genomic DNA; note = Gene: ROBO4; note = Location (start to end; relative to TSS): ROBO4_27_57; note = Orientation (relative to transcription): sense; note = sgRNA Position: 124897814; note = Sequence Name: 56322-704_101_SL_seq_11926
gtgctcgggacaaggacata

SEQ ID NO: 11927 - DNA, 20 bp, Homo sapiens
  source 1..20: mol_type = genomic DNA; note = Gene: ROBO4; note = Location (start to end; relative to TSS): ROBO4_67_97; note = Orientation (relative to transcription): sense; note = sgRNA Position: 124897774; note = Sequence Name: 56322-704_101_SL_seq_11927
ctctggaggagacagcctcc

SEQ ID NO: 11928 - DNA, 20 bp, Homo sapiens
  source 1..20: mol_type = genomic DNA; note = Gene: ROBO4; note = Location (start to end; relative to TSS): ROBO4_19_49; note = Orientation (relative to transcription): sense; note = sgRNA Position: 124897822; note = Sequence Name: 56322-704_101_SL_seq_11928
aggacaaagtgctcgggaca

SEQ ID NO: 11929 - DNA, 20 bp, Homo sapiens
  source 1..20: mol_type = genomic DNA; note = Gene: ROBO4; note = Location (start to end; relative to TSS): ROBO4_50_80; note = Orientation (relative to transcription): sense; note = sgRNA Position: 124897791; note = Sequence Name: 56322-704_101_SL_seq_11929
ctgagagtagccatgggctc

SEQ ID NO: 11930 - DNA, 20 bp, Homo sapiens
  source 1..20: mol_type = genomic DNA; note = Gene: ROR1; note = Location (start to end; relative to TSS): ROR1_47_77; note = Orientation (relative to transcription): antisense; note = sgRNA Position: 63774070; note = Sequence Name: 56322-704_101_SL_seq_11930
tcccggggctccctcggcgg

SEQ ID NO: 11931 - DNA, 20 bp, Homo sapiens
  source 1..20: mol_type = genomic DNA; note = Gene: ROR1; note = Location (start to end; relative to TSS): ROR1_77_107; note = Orientation (relative to transcription): antisense; note = sgRNA Position: 63774100; note = Sequence Name: 56322-704_101_SL_seq_11931
aacagcgcaccctgcgccca

SEQ ID NO: 11932 - DNA, 20 bp, Homo sapiens
  source 1..20: mol_type = genomic DNA; note = Gene: ROR1; note = Location (start to end; relative to TSS): ROR1_44_74; note = Orientation (relative to transcription): antisense; note = sgRNA Position: 63774067; note = Sequence Name: 56322-704_101_SL_seq_11932
cggggctccctcggcggcgg

SEQ ID NO: 11933 - DNA, 20 bp, Homo sapiens
  source 1..20: mol_type = genomic DNA; note = Gene: ROR1; note = Location (start to end; relative to TSS): ROR1_76_106; note = Orientation (relative to transcription): antisense; note = sgRNA Position: 63774099; note = Sequence Name: 56322-704_101_SL_seq_11933
acagcgcaccctgcgcccag

SEQ ID NO: 11934 - DNA, 20 bp, Homo sapiens
  source 1..20: mol_type = genomic DNA; note = Gene: ROR1; note = Location (start to end; relative to TSS): ROR1_41_71; note = Orientation (relative to transcription): sense; note = sgRNA Position: 63774084; note = Sequence Name: 56322-704_101_SL_seq_11934
ccgccgagggagccccggga

SEQ ID NO: 11935 - DNA, 20 bp, Homo sapiens
  source 1..20: mol_type = genomic DNA; note = Gene: ROR1; note = Location (start to end; relative to TSS): ROR1_73_103; note = Orientation (relative to transcription): sense; note = sgRNA Position: 63774116; note = Sequence Name: 56322-704_101_SL_seq_11935
ggcgcagggtgcgctgttct

SEQ ID NO: 11936 - DNA, 20 bp, Homo sapiens
  source 1..20: mol_type = genomic DNA; note = Gene: ROR1; note = Location (start to end; relative to TSS): ROR1_28_58; note = Orientation (relative to transcription): sense; note = sgRNA Position: 63774071; note = Sequence Name: 56322-704_101_SL_seq_11936
gccgccaccgccgccgccga

SEQ ID NO: 11937 - DNA, 20 bp, Homo sapiens
  source 1..20: mol_type = genomic DNA; note = Gene: ROR1; note = Location (start to end; relative to TSS): ROR1_59_89; note = Orientation (relative to transcription): sense; note = sgRNA Position: 63774102; note = Sequence Name: 56322-704_101_SL_seq_11937
gacggcagcccctgggcgca

SEQ ID NO: 11938 - DNA, 20 bp, Homo sapiens
  source 1..20: mol_type = genomic DNA; note = Gene: ROR1; note = Location (start to end; relative to TSS): ROR1_27_57; note = Orientation (relative to transcription): sense; note = sgRNA Position: 63774070; note = Sequence Name: 56322-704_101_SL_seq_11938
agccgccaccgccgccgccg

SEQ ID NO: 11939 - DNA, 20 bp, Homo sapiens
  source 1..20: mol_type = genomic DNA; note = Gene: ROR1; note = Location (start to end; relative to TSS): ROR1_58_88; note = Orientation (relative to transcription): sense; note = sgRNA Position: 63774101; note = Sequence Name: 56322-704_101_SL_seq_11939
ggacggcagcccctgggcgc

SEQ ID NO: 11940 - DNA, 20 bp, Homo sapiens
  source 1..20: mol_type = genomic DNA; note = Gene: ROR2; note = Location (start to end; relative to TSS): ROR2_47_77; note = Orientation (relative to transcription): antisense; note = sgRNA Position: 91950177; note = Sequence Name: 56322-704_101_SL_seq_11940
gctggggaggttccttggcg

SEQ ID NO: 11941 - DNA, 20 bp, Homo sapiens
  source 1..20: mol_type = genomic DNA; note = Gene: ROR2; note = Location (start to end; relative to TSS): ROR2_79_109; note = Orientation (relative to transcription): antisense; note = sgRNA Position: 91950145; note = Sequence Name: 56322-704_101_SL_seq_11941
gcgccgctcggctccggcca

SEQ ID NO: 11942 - DNA, 20 bp, Homo sapiens
  source 1..20: mol_type = genomic DNA; note = Gene: ROR2; note = Location (start to end; relative to TSS): ROR2_46_76; note = Orientation (relative to transcription): antisense; note = sgRNA Position: 91950178; note = Sequence Name: 56322-704_101_SL_seq_11942
ctggggaggttccttggcgc

SEQ ID NO: 11943 - DNA, 20 bp, Homo sapiens
  source 1..20: mol_type = genomic DNA; note = Gene: ROR2; note = Location (start to end; relative to TSS): ROR2_77_107; note = Orientation (relative to transcription): sense; note = sgRNA Position: 91950127; note = Sequence Name: 56322-704_101_SL_seq_11943
cggagccgagcggcgcatcc

SEQ ID NO: 11944 - DNA, 20 bp, Homo sapiens
  source 1..20: mol_type = genomic DNA; note = Gene: ROR2; note = Location (start to end; relative to TSS): ROR2_40_70; note = Orientation (relative to transcription): antisense; note = sgRNA Position: 91950184; note = Sequence Name: 56322-704_101_SL_seq_11944
aggttccttggcgcgggctg

SEQ ID NO: 11945 - DNA, 20 bp, Homo sapiens
  source 1..20: mol_type = genomic DNA; note = Gene: ROR2; note = Location (start to end; relative to TSS): ROR2_73_103; note = Orientation (relative to transcription): antisense; note = sgRNA Position: 91950151; note = Sequence Name: 56322-704_101_SL_seq_11945
ctcggctccggccacggcaa

SEQ ID NO: 11946 - DNA, 20 bp, Homo sapiens
  source 1..20: mol_type = genomic DNA; note = Gene: ROR2; note = Location (start to end; relative to TSS): ROR2_26_56; note = Orientation (relative to transcription): sense; note = sgRNA Position: 91950178; note = Sequence Name: 56322-704_101_SL_seq_11946
ggacgccccagcccgcgcca

SEQ ID NO: 11947 - DNA, 20 bp, Homo sapiens
  source 1..20: mol_type = genomic DNA; note = Gene: ROR2; note = Location (start to end; relative to TSS): ROR2_57_87; note = Orientation (relative to transcription): sense; note = sgRNA Position: 91950147; note = Sequence Name: 56322-704_101_SL_seq_11947
cagccagcccttgccgtggc

SEQ ID NO: 11948 - DNA, 20 bp, Homo sapiens
  source 1..20: mol_type = genomic DNA; note = Gene: ROR2; note = Location (start to end; relative to TSS): ROR2_21_51; note = Orientation (relative to transcription): antisense; note = sgRNA Position: 91950203; note = Sequence Name: 56322-704_101_SL_seq_11948
ggggcgtcccgccggccgcc

SEQ ID NO: 11949 - DNA, 20 bp, Homo sapiens
  source 1..20: mol_type = genomic DNA; note = Gene: ROR2; note = Location (start to end; relative to TSS): ROR2_53_83; note = Orientation (relative to transcription): sense; note = sgRNA Position: 91950151; note = Sequence Name: 56322-704_101_SL_seq_11949
tccccagccagcccttgccg

SEQ ID NO: 11950 - DNA, 20 bp, Homo sapiens
  source 1..20: mol_type = genomic DNA; note = Gene: SCN1B; note = Location (start to end; relative to TSS): SCN1B_41_71; note = Orientation (relative to transcription): antisense; note = sgRNA Position: 35030517; note = Sequence Name: 56322-704_101_SL_seq_11950
caccgaccccggtcccgctc

SEQ ID NO: 11951 - DNA, 20 bp, Homo sapiens
  source 1..20: mol_type = genomic DNA; note = Gene: SCN1B; note = Location (start to end; relative to TSS): SCN1B_100_130; note = Orientation (relative to transcription): sense; note = sgRNA Position: 35030596; note = Sequence Name: 56322-704_101_SL_seq_11951
agcagcggccgccgcccgcg

SEQ ID NO: 11952 - DNA, 20 bp, Homo sapiens
  source 1..20: mol_type = genomic DNA; note = Gene: SCN1B; note = Location (start to end; relative to TSS): SCN1B_26_56; note = Orientation (relative to transcription): sense; note = sgRNA Position: 35030522; note = Sequence Name: 56322-704_101_SL_seq_11952
cccgagccggagcgggaccg

SEQ ID NO: 11953 - DNA, 20 bp, Homo sapiens
  source 1..20: mol_type = genomic DNA; note = Gene: SCN1B; note = Location (start to end; relative to TSS): SCN1B_85_115; note = Orientation (relative to transcription): sense; note = sgRNA Position: 35030581; note = Sequence Name: 56322-704_101_SL_seq_11953
cagcgcagcagcccgagcag

SEQ ID NO: 11954 - DNA, 20 bp, Homo sapiens
  source 1..20: mol_type = genomic DNA; note = Gene: SCN1B; note = Location (start to end; relative to TSS): SCN1B_25_55; note = Orientation (relative to transcription): antisense; note = sgRNA Position: 35030501; note = Sequence Name: 56322-704_101_SL_seq_11954
gctccggctcgggcgcgctc

SEQ ID NO: 11955 - DNA, 20 bp, Homo sapiens
  source 1..20: mol_type = genomic DNA; note = Gene: SCN1B; note = Location (start to end; relative to TSS): SCN1B_79_109; note = Orientation (relative to transcription): antisense; note = sgRNA Position: 35030555; note = Sequence Name: 56322-704_101_SL_seq_11955
ctgcgctggcgcgcgcagcc

SEQ ID NO: 11956 - DNA, 20 bp, Homo sapiens
  source 1..20: mol_type = genomic DNA; note = Gene: SCN1B; note = Location (start to end; relative to TSS): SCN1B_18_48; note = Orientation (relative to transcription): sense; note = sgRNA Position: 35030514; note = Sequence Name: 56322-704_101_SL_seq_11956
cgagcgcgcccgagccggag

SEQ ID NO: 11957 - DNA, 20 bp, Homo sapiens
  source 1..20: mol_type = genomic DNA; note = Gene: SCN1B; note = Location (start to end; relative to TSS): SCN1B_66_96; note = Orientation (relative to transcription): antisense; note = sgRNA Position: 35030542; note = Sequence Name: 56322-704_101_SL_seq_11957
cgcagccgggcacatccgct

SEQ ID NO: 11958 - DNA, 20 bp, Homo sapiens
  source 1..20: mol_type = genomic DNA; note = Gene: SCN1B; note = Location (start to end; relative to TSS): SCN1B_20_50; note = Orientation (relative to transcription): antisense; note = sgRNA Position: 35030496; note = Sequence Name: 56322-704_101_SL_seq_11958
ggctcgggcgcgctcgggcg

SEQ ID NO: 11959 - DNA, 20 bp, Homo sapiens
  source 1..20: mol_type = genomic DNA; note = Gene: SCN1B; note = Location (start to end; relative to TSS): SCN1B_52_82; note = Orientation (relative to transcription): antisense; note = sgRNA Position: 35030528; note = Sequence Name: 56322-704_101_SL_seq_11959
tccgctaggtgcaccgaccc

SEQ ID NO: 11960 - DNA, 20 bp, Homo sapiens
  source 1..20: mol_type = genomic DNA; note = Gene: SCN2B; note = Location (start to end; relative to TSS): SCN2B_42_72; note = Orientation (relative to transcription): antisense; note = sgRNA Position: 118176593; note = Sequence Name: 56322-704_101_SL_seq_11960
ttccatctctctaatatggc

SEQ ID NO: 11961 - DNA, 20 bp, Homo sapiens
  source 1..20: mol_type = genomic DNA; note = Gene: SCN2B; note = Location (start to end; relative to TSS): SCN2B_130_160; note = Orientation (relative to transcription): antisense; note = sgRNA Position: 118176505; note = Sequence Name: 56322-704_101_SL_seq_11961
cgagaactacaagggaggaa

SEQ ID NO: 11962 - DNA, 20 bp, Homo sapiens
  source 1..20: mol_type = genomic DNA; note = Gene: SCN2B; note = Location (start to end; relative to TSS): SCN2B_31_61; note = Orientation (relative to transcription): sense; note = sgRNA Position: 118176584; note = Sequence Name: 56322-704_101_SL_seq_11962
agccggccatattagagaga

SEQ ID NO: 11963 - DNA, 20 bp, Homo sapiens
  source 1..20: mol_type = genomic DNA; note = Gene: SCN2B; note = Location (start to end; relative to TSS): SCN2B_126_156; note = Orientation (relative to transcription): antisense; note = sgRNA Position: 118176509; note = Sequence Name: 56322-704_101_SL_seq_11963
aactacaagggaggaatggt

SEQ ID NO: 11964 - DNA, 20 bp, Homo sapiens
  source 1..20: mol_type = genomic DNA; note = Gene: SCN2B; note = Location (start to end; relative to TSS): SCN2B_14_44; note = Orientation (relative to transcription): sense; note = sgRNA Position: 118176601; note = Sequence Name: 56322-704_101_SL_seq_11964
tttagcagcaacatacaagc

SEQ ID NO: 11965 - DNA, 20 bp, Homo sapiens
  source 1..20: mol_type = genomic DNA; note = Gene: SCN2B; note = Location (start to end; relative to TSS): SCN2B_105_135; note = Orientation (relative to transcription): antisense; note = sgRNA Position: 118176530; note = Sequence Name: 56322-704_101_SL_seq_11965
ggatgctaaaaaaaaatgca

SEQ ID NO: 11966 - DNA, 20 bp, Homo sapiens
  source 1..20: mol_type = genomic DNA; note = Gene: SCN2B; note = Location (start to end; relative to TSS): SCN2B_9_39; note = Orientation (relative to transcription): antisense; note = sgRNA Position: 118176626; note = Sequence Name: 56322-704_101_SL_seq_11966
gctgctaaaaagagagagag

SEQ ID NO: 11967 - DNA, 20 bp, Homo sapiens
  source 1..20: mol_type = genomic DNA; note = Gene: SCN2B; note = Location (start to end; relative to TSS): SCN2B_74_104; note = Orientation (relative to transcription): antisense; note = sgRNA Position: 118176561; note = Sequence Name: 56322-704_101_SL_seq_11967
caaagacatatacaacatta

SEQ ID NO: 11968 - DNA, 20 bp, Homo sapiens
  source 1..20: mol_type = genomic DNA; note = Gene: SCN2B; note = Location (start to end; relative to TSS): SCN2B_8_38; note = Orientation (relative to transcription): antisense; note = sgRNA Position: 118176627; note = Sequence Name: 56322-704_101_SL_seq_11968
ctgctaaaaagagagagaga

SEQ ID NO: 11969 - DNA, 20 bp, Homo sapiens
  source 1..20: mol_type = genomic DNA; note = Gene: SCN2B; note = Location (start to end; relative to TSS): SCN2B_42_72; note = Orientation (relative to transcription): antisense; note = sgRNA Position: 118176593; note = Sequence Name: 56322-704_101_SL_seq_11969
ttccatctctctaatatggc

SEQ ID NO: 11970 - DNA, 20 bp, Homo sapiens
  source 1..20: mol_type = genomic DNA; note = Gene: SCN3B; note = Location (start to end; relative to TSS): SCN3B_42_72; note = Orientation (relative to transcription): antisense; note = sgRNA Position: 123654578; note = Sequence Name: 56322-704_101_SL_seq_11970
caacccttctctaggccccc

SEQ ID NO: 11971 - DNA, 20 bp, Homo sapiens
  source 1..20: mol_type = genomic DNA; note = Gene: SCN3B; note = Location (start to end; relative to TSS): SCN3B_72_102; note = Orientation (relative to transcription): antisense; note = sgRNA Position: 123654548; note = Sequence Name: 56322-704_101_SL_seq_11971
gggccccgaccctgggtggc

SEQ ID NO: 11972 - DNA, 20 bp, Homo sapiens
  source 1..20: mol_type = genomic DNA; note = Gene: SCN3B; note = Location (start to end; relative to TSS): SCN3B_30_60; note = Orientation (relative to transcription): sense; note = sgRNA Position: 123654570; note = Sequence Name: 56322-704_101_SL_seq_11972
cggcctgggggcctagagaa

SEQ ID NO: 11973 - DNA, 20 bp, Homo sapiens
  source 1..20: mol_type = genomic DNA; note = Gene: SCN3B; note = Location (start to end; relative to TSS): SCN3B_60_90; note = Orientation (relative to transcription): sense; note = sgRNA Position: 123654540; note = Sequence Name: 56322-704_101_SL_seq_11973
tcacctgccacccagggtcg

SEQ ID NO: 11974 - DNA, 20 bp, Homo sapiens
  source 1..20: mol_type = genomic DNA; note = Gene: SCN3B; note = Location (start to end; relative to TSS): SCN3B_29_59; note = Orientation (relative to transcription): sense; note = sgRNA Position: 123654571; note = Sequence Name: 56322-704_101_SL_seq_11974
acggcctgggggcctagaga

SEQ ID NO: 11975 - DNA, 20 bp, Homo sapiens
  source 1..20: mol_type = genomic DNA; note = Gene: SCN3B; note = Location (start to end; relative to TSS): SCN3B_59_89; note = Orientation (relative to transcription): sense; note = sgRNA Position: 123654541; note = Sequence Name: 56322-704_101_SL_seq_11975
atcacctgccacccagggtc

SEQ ID NO: 11976 - DNA, 20 bp, Homo sapiens
  source 1..20: mol_type = genomic DNA; note = Gene: SCN3B; note = Location (start to end; relative to TSS): SCN3B_18_48; note = Orientation (relative to transcription): sense; note = sgRNA Position: 123654582; note = Sequence Name: 56322-704_101_SL_seq_11976
tgacagcacacacggcctgg

SEQ ID NO: 11977 - DNA, 20 bp, Homo sapiens
  source 1..20: mol_type = genomic DNA; note = Gene: SCN3B; note = Location (start to end; relative to TSS): SCN3B_53_83; note = Orientation (relative to transcription): sense; note = sgRNA Position: 123654547; note = Sequence Name: 56322-704_101_SL_seq_11977
ttgctgatcacctgccaccc

SEQ ID NO: 11978 - DNA, 20 bp, Homo sapiens
  source 1..20: mol_type = genomic DNA; note = Gene: SCN3B; note = Location (start to end; relative to TSS): SCN3B_17_47; note = Orientation (relative to transcription): sense; note = sgRNA Position: 123654583; note = Sequence Name: 56322-704_101_SL_seq_11978
ctgacagcacacacggcctg

SEQ ID NO: 11979 - DNA, 20 bp, Homo sapiens
  source 1..20: mol_type = genomic DNA; note = Gene: SCN3B; note = Location (start to end; relative to TSS): SCN3B_50_80; note = Orientation (relative to transcription): antisense; note = sgRNA Position: 123654570; note = Sequence Name: 56322-704_101_SL_seq_11979
gtgatcagcaacccttctct

SEQ ID NO: 11980 - DNA, 20 bp, Homo sapiens
  source 1..20: mol_type = genomic DNA; note = Gene: SCN4B; note = Location (start to end; relative to TSS): SCN4B_34_64; note = Orientation (relative to transcription): sense; note = sgRNA Position: 118152765; note = Sequence Name: 56322-704_101_SL_seq_11980
agagctccggggtagctttg

SEQ ID NO: 11981 - DNA, 20 bp, Homo sapiens
  source 1..20: mol_type = genomic DNA; note = Gene: SCN4B; note = Location (start to end; relative to TSS): SCN4B_77_107; note = Orientation (relative to transcription): antisense; note = sgRNA Position: 118152742; note = Sequence Name: 56322-704_101_SL_seq_11981
acagccgcgctctccgcccg

SEQ ID NO: 11982 - DNA, 20 bp, Homo sapiens
  source 1..20: mol_type = genomic DNA; note = Gene: SCN4B; note = Location (start to end; relative to TSS): SCN4B_33_63; note = Orientation (relative to transcription): antisense; note = sgRNA Position: 118152786; note = Sequence Name: 56322-704_101_SL_seq_11982
accccggagctctgcgccgc

SEQ ID NO: 11983 - DNA, 20 bp, Homo sapiens
  source 1..20: mol_type = genomic DNA; note = Gene: SCN4B; note = Location (start to end; relative to TSS): SCN4B_73_103; note = Orientation (relative to transcription): antisense; note = sgRNA Position: 118152746; note = Sequence Name: 56322-704_101_SL_seq_11983
ccgcgctctccgcccgaggt

SEQ ID NO: 11984 - DNA, 20 bp, Homo sapiens
  source 1..20: mol_type = genomic DNA; note = Gene: SCN4B; note = Location (start to end; relative to TSS): SCN4B_29_59; note = Orientation (relative to transcription): antisense; note = sgRNA Position: 118152790; note = Sequence Name: 56322-704_101_SL_seq_11984
cggagctctgcgccgccggt

SEQ ID NO: 11985 - DNA, 20 bp, Homo sapiens
  source 1..20: mol_type = genomic DNA; note = Gene: SCN4B; note = Location (start to end; relative to TSS): SCN4B_66_96; note = Orientation (relative to transcription): antisense; note = sgRNA Position: 118152753; note = Sequence Name: 56322-704_101_SL_seq_11985
ctccgcccgaggtcggcgtt

SEQ ID NO: 11986 - DNA, 20 bp, Homo sapiens
  source 1..20: mol_type = genomic DNA; note = Gene: SCN4B; note = Location (start to end; relative to TSS): SCN4B_27_57; note = Orientation (relative to transcription): antisense; note = sgRNA Position: 118152792; note = Sequence Name: 56322-704_101_SL_seq_11986
gagctctgcgccgccggtcg

SEQ ID NO: 11987 - DNA, 20 bp, Homo sapiens
  source 1..20: mol_type = genomic DNA; note = Gene: SCN4B; note = Location (start to end; relative to TSS): SCN4B_64_94; note = Orientation (relative to transcription): sense; note = sgRNA Position: 118152735; note = Sequence Name: 56322-704_101_SL_seq_11987
ccgacctcgggcggagagcg

SEQ ID NO: 11988 - DNA, 20 bp, Homo sapiens
  source 1..20: mol_type = genomic DNA; note = Gene: SCN4B; note = Location (start to end; relative to TSS): SCN4B_21_51; note = Orientation (relative to transcription): antisense; note = sgRNA Position: 118152798; note = Sequence Name: 56322-704_101_SL_seq_11988
tgcgccgccggtcggggctc

SEQ ID NO: 11989 - DNA, 20 bp, Homo sapiens
  source 1..20: mol_type = genomic DNA; note = Gene: SCN4B; note = Location (start to end; relative to TSS): SCN4B_51_81; note = Orientation (relative to transcription): sense; note = sgRNA Position: 118152748; note = Sequence Name: 56322-704_101_SL_seq_11989
ttgtggccgaacgccgacct

SEQ ID NO: 11990 - DNA, 20 bp, Homo sapiens
  source 1..20: mol_type = genomic DNA; note = Gene: SDK1; note = Location (start to end; relative to TSS): SDK1_48_78; note = Orientation (relative to transcription): antisense; note = sgRNA Position: 3301306; note = Sequence Name: 56322-704_101_SL_seq_11990
tccgaggggtccgccgggcg

SEQ ID NO: 11991 - DNA, 20 bp, Homo sapiens
  source 1..20: mol_type = genomic DNA; note = Gene: SDK1; note = Location (start to end; relative to TSS): SDK1_113_143; note = Orientation (relative to transcription): sense; note = sgRNA Position: 3301391; note = Sequence Name: 56322-704_101_SL_seq_11991
gttgacaacttcttctcgcc

SEQ ID NO: 11992 - DNA, 20 bp, Homo sapiens
  source 1..20: mol_type = genomic DNA; note = Gene: SDK1; note = Location (start to end; relative to TSS): SDK1_45_75; note = Orientation (relative to transcription): antisense; note = sgRNA Position: 3301303; note = Sequence Name: 56322-704_101_SL_seq_11992
gaggggtccgccgggcgcgg

SEQ ID NO: 11993 - DNA, 20 bp, Homo sapiens
  source 1..20: mol_type = genomic DNA; note = Gene: SDK1; note = Location (start to end; relative to TSS): SDK1_103_133; note = Orientation (relative to transcription): antisense; note = sgRNA Position: 3301361; note = Sequence Name: 56322-704_101_SL_seq_11993
caacgggggaaattcgcgtc

SEQ ID NO: 11994 - DNA, 20 bp, Homo sapiens
  source 1..20: mol_type = genomic DNA; note = Gene: SDK1; note = Location (start to end; relative to TSS): SDK1_38_68; note = Orientation (relative to transcription): sense; note = sgRNA Position: 3301316; note = Sequence Name: 56322-704_101_SL_seq_11994
tccgcgcccggcggacccct

SEQ ID NO: 11995 - DNA, 20 bp, Homo sapiens
  source 1..20: mol_type = genomic DNA; note = Gene: SDK1; note = Location (start to end; relative to TSS): SDK1_75_105; note = Orientation (relative to transcription): sense; note = sgRNA Position: 3301353; note = Sequence Name: 56322-704_101_SL_seq_11995
gctcgggactgcgtgagcgc

SEQ ID NO: 11996 - DNA, 20 bp, Homo sapiens
  source 1..20: mol_type = genomic DNA; note = Gene: SDK1; note = Location (start to end; relative to TSS): SDK1_29_59; note = Orientation (relative to transcription): sense; note = sgRNA Position: 3301307; note = Sequence Name: 56322-704_101_SL_seq_11996
ggcggctcctccgcgcccgg

SEQ ID NO: 11997 - DNA, 20 bp, Homo sapiens
  source 1..20: mol_type = genomic DNA; note = Gene: SDK1; note = Location (start to end; relative to TSS): SDK1_62_92; note = Orientation (relative to transcription): antisense; note = sgRNA Position: 3301320; note = Sequence Name: 56322-704_101_SL_seq_11997
cccgccgcgctagctccgag

SEQ ID NO: 11998 - DNA, 20 bp, Homo sapiens
  source 1..20: mol_type = genomic DNA; note = Gene: SDK1; note = Location (start to end; relative to TSS): SDK1_26_56; note = Orientation (relative to transcription): sense; note = sgRNA Position: 3301304; note = Sequence Name: 56322-704_101_SL_seq_11998
ggcggcggctcctccgcgcc

SEQ ID NO: 11999 - DNA, 20 bp, Homo sapiens
  source 1..20: mol_type = genomic DNA; note = Gene: SDK1; note = Location (start to end; relative to TSS): SDK1_59_89; note = Orientation (relative to transcription): sense; note = sgRNA Position: 3301337; note = Sequence Name: 56322-704_101_SL_seq_11999
ggagctagcgcggcgggctc

SEQ ID NO: 12000 - DNA, 20 bp, Homo sapiens
  source 1..20: mol_type = genomic DNA; note = Gene: SDK2; note = Location (start to end; relative to TSS): SDK2_32_62; note = Orientation (relative to transcription): sense; note = sgRNA Position: 73644389; note = Sequence Name: 56322-704_101_SL_seq_12000
ccgccctgtttgggagaagt

SEQ ID NO: 12001 - DNA, 20 bp, Homo sapiens
  source 1..20: mol_type = genomic DNA; note = Gene: SDK2; note = Location (start to end; relative to TSS): SDK2_82_112; note = Orientation (relative to transcription): sense; note = sgRNA Position: 73644339; note = Sequence Name: 56322-704_101_SL_seq_12001
cctagtccgagagggcggcc

SEQ ID NO: 12002 - DNA, 20 bp, Homo sapiens
  source 1..20: mol_type = genomic DNA; note = Gene: SDK2; note = Location (start to end; relative to TSS): SDK2_27_57; note = Orientation (relative to transcription): antisense; note = sgRNA Position: 73644414; note = Sequence Name: 56322-704_101_SL_seq_12002
acagggcggcctctgcgatc

SEQ ID NO: 12003 - DNA, 20 bp, Homo sapiens
  source 1..20: mol_type = genomic DNA; note = Gene: SDK2; note = Location (start to end; relative to TSS): SDK2_77_107; note = Orientation (relative to transcription): sense; note = sgRNA Position: 73644344; note = Sequence Name: 56322-704_101_SL_seq_12003
ggcgccctagtccgagaggg

SEQ ID NO: 12004 - DNA, 20 bp, Homo sapiens
  source 1..20: mol_type = genomic DNA; note = Gene: SDK2; note = Location (start to end; relative to TSS): SDK2_38_68; note = Orientation (relative to transcription): sense; note = sgRNA Position: 73644383; note = Sequence Name: 56322-704_101_SL_seq_12004
tgtttgggagaagtcggagt

SEQ ID NO: 12005 - DNA, 20 bp, Homo sapiens
  source 1..20: mol_type = genomic DNA; note = Gene: SDK2; note = Location (start to end; relative to TSS): SDK2_74_104; note = Orientation (relative to transcription): sense; note = sgRNA Position: 73644347; note = Sequence Name: 56322-704_101_SL_seq_12005
agaggcgccctagtccgaga

SEQ ID NO: 12006 - DNA, 20 bp, Homo sapiens
  source 1..20: mol_type = genomic DNA; note = Gene: SDK2; note = Location (start to end; relative to TSS): SDK2_23_53; note = Orientation (relative to transcription): antisense; note = sgRNA Position: 73644418; note = Sequence Name: 56322-704_101_SL_seq_12006
ggcggcctctgcgatccggc

SEQ ID NO: 12007 - DNA, 20 bp, Homo sapiens
  source 1..20: mol_type = genomic DNA; note = Gene: SDK2; note = Location (start to end; relative to TSS): SDK2_73_103; note = Orientation (relative to transcription): sense; note = sgRNA Position: 73644348; note = Sequence Name: 56322-704_101_SL_seq_12007
gagaggcgccctagtccgag

SEQ ID NO: 12008 - DNA, 20 bp, Homo sapiens
  source 1..20: mol_type = genomic DNA; note = Gene: SDK2; note = Location (start to end; relative to TSS): SDK2_22_52; note = Orientation (relative to transcription): antisense; note = sgRNA Position: 73644419; note = Sequence Name: 56322-704_101_SL_seq_12008
gcggcctctgcgatccggcc

SEQ ID NO: 12009 - DNA, 20 bp, Homo sapiens
  source 1..20: mol_type = genomic DNA; note = Gene: SDK2; note = Location (start to end; relative to TSS): SDK2_56_86; note = Orientation (relative to transcription): sense; note = sgRNA Position: 73644365; note = Sequence Name: 56322-704_101_SL_seq_12009
gttggggtgctaagggagag

SEQ ID NO: 12010 - DNA, 20 bp, Homo sapiens
  source 1..20: mol_type = genomic DNA; note = Gene: SEMA3A; note = Location (start to end; relative to TSS): SEMA3A_35_65; note = Orientation (relative to transcription): sense; note = sgRNA Position: 84194730; note = Sequence Name: 56322-704_101_SL_seq_12010
gaggtgttagtgttgccatg

SEQ ID NO: 12011 - DNA, 20 bp, Homo sapiens
  source 1..20: mol_type = genomic DNA; note = Gene: SEMA3A; note = Location (start to end; relative to TSS): SEMA3A_108_138; note = Orientation (relative to transcription): antisense; note = sgRNA Position: 84194677; note = Sequence Name: 56322-704_101_SL_seq_12011
atctggaaactggaggtaac

SEQ ID NO: 12012 - DNA, 20 bp, Homo sapiens
  source 1..20: mol_type = genomic DNA; note = Gene: SEMA3A; note = Location (start to end; relative to TSS): SEMA3A_59_89; note = Orientation (relative to transcription): antisense; note = sgRNA Position: 84194726; note = Sequence Name: 56322-704_101_SL_seq_12012
tgcagacaatcaagacctca

SEQ ID NO: 12013 - DNA, 20 bp, Homo sapiens
  source 1..20: mol_type = genomic DNA; note = Gene: SEMA3A; note = Location (start to end; relative to TSS): SEMA3A_99_129; note = Orientation (relative to transcription): antisense; note = sgRNA Position: 84194686; note = Sequence Name: 56322-704_101_SL_seq_12013
ctggaggtaacaggtgattt

SEQ ID NO: 12014 - DNA, 20 bp, Homo sapiens
  source 1..20: mol_type = genomic DNA; note = Gene: SEMA3A; note = Location (start to end; relative to TSS): SEMA3A_16_46; note = Orientation (relative to transcription): sense; note = sgRNA Position: 84194749; note = Sequence Name: 56322-704_101_SL_seq_12014
agtgactgttacagaagaag

SEQ ID NO: 12015 - DNA, 20 bp, Homo sapiens
  source 1..20: mol_type = genomic DNA; note = Gene: SEMA3A; note = Location (start to end; relative to TSS): SEMA3A_59_89; note = Orientation (relative to transcription): antisense; note = sgRNA Position: 84194726; note = Sequence Name: 56322-704_101_SL_seq_12015
tgcagacaatcaagacctca

SEQ ID NO: 12016 - DNA, 20 bp, Homo sapiens
  source 1..20: mol_type = genomic DNA; note = Gene: SEMA3A; note = Location (start to end; relative to TSS): SEMA3A_-26_4; note = Orientation (relative to transcription): sense; note = sgRNA Position: 84194791; note = Sequence Name: 56322-704_101_SL_seq_12016
tttttttttttctttttgga

SEQ ID NO: 12017 - DNA, 20 bp, Homo sapiens
  source 1..20: mol_type = genomic DNA; note = Gene: SEMA3A; note = Location (start to end; relative to TSS): SEMA3A_16_46; note = Orientation (relative to transcription): sense; note = sgRNA Position: 84194749; note = Sequence Name: 56322-704_101_SL_seq_12017
agtgactgttacagaagaag

SEQ ID NO: 12018 - DNA, 20 bp, Homo sapiens
  source 1..20: mol_type = genomic DNA; note = Gene: SEMA3A; note = Location (start to end; relative to TSS): SEMA3A_-27_3; note = Orientation (relative to transcription): sense; note = sgRNA Position: 84194792; note = Sequence Name: 56322-704_101_SL_seq_12018
ttttttttttttctttttgg

SEQ ID NO: 12019 - DNA, 20 bp, Homo sapiens
  source 1..20: mol_type = genomic DNA; note = Gene: SEMA3A; note = Location (start to end; relative to TSS): SEMA3A_35_65; note = Orientation (relative to transcription): sense; note = sgRNA Position: 84194730; note = Sequence Name: 56322-704_101_SL_seq_12019
gaggtgttagtgttgccatg

SEQ ID NO: 12020 - DNA, 20 bp, Homo sapiens
  source 1..20: mol_type = genomic DNA; note = Gene: SEMA3B; note = Location (start to end; relative to TSS): SEMA3B_61_91; note = Orientation (relative to transcription): antisense; note = sgRNA Position: 50269214; note = Sequence Name: 56322-704_101_SL_seq_12020
cagggtgctcagggttcagc

SEQ ID NO: 12021 - DNA, 20 bp, Homo sapiens
  source 1..20: mol_type = genomic DNA; note = Gene: SEMA3B; note = Location (start to end; relative to TSS): SEMA3B_97_127; note = Orientation (relative to transcription): sense; note = sgRNA Position: 50269270; note = Sequence Name: 56322-704_101_SL_seq_12021
ggggctgccgccgtgatccc

SEQ ID NO: 12022 - DNA, 20 bp, Homo sapiens
  source 1..20: mol_type = genomic DNA; note = Gene: SEMA3B; note = Location (start to end; relative to TSS): SEMA3B_50_80; note = Orientation (relative to transcription): antisense; note = sgRNA Position: 50269203; note = Sequence Name: 56322-704_101_SL_seq_12022
gggttcagcgggtgtgtgtg

SEQ ID NO: 12023 - DNA, 20 bp, Homo sapiens
  source 1..20: mol_type = genomic DNA; note = Gene: SEMA3B; note = Location (start to end; relative to TSS): SEMA3B_80_110; note = Orientation (relative to transcription): antisense; note = sgRNA Position: 50269233; note = Sequence Name: 56322-704_101_SL_seq_12023
ccgccccatctcagcagctc

SEQ ID NO: 12024 - DNA, 20 bp, Homo sapiens
  source 1..20: mol_type = genomic DNA; note = Gene: SEMA3B; note = Location (start to end; relative to TSS): SEMA3B_29_59; note = Orientation (relative to transcription): antisense; note = sgRNA Position: 50269182; note = Sequence Name: 56322-704_101_SL_seq_12024
ggaggagccttgagctgccc

SEQ ID NO: 12025 - DNA, 20 bp, Homo sapiens
  source 1..20: mol_type = genomic DNA; note = Gene: SEMA3B; note = Location (start to end; relative to TSS): SEMA3B_61_91; note = Orientation (relative to transcription): antisense; note = sgRNA Position: 50269214; note = Sequence Name: 56322-704_101_SL_seq_12025
cagggtgctcagggttcagc

SEQ ID NO: 12026 - DNA, 20 bp, Homo sapiens
  source 1..20: mol_type = genomic DNA; note = Gene: SEMA3B; note = Location (start to end; relative to TSS): SEMA3B_16_46; note = Orientation (relative to transcription): antisense; note = sgRNA Position: 50269169; note = Sequence Name: 56322-704_101_SL_seq_12026
gctgccctggactctgcccc

SEQ ID NO: 12027 - DNA, 20 bp, Homo sapiens
  source 1..20: mol_type = genomic DNA; note = Gene: SEMA3B; note = Location (start to end; relative to TSS): SEMA3B_50_80; note = Orientation (relative to transcription): antisense; note = sgRNA Position: 50269203; note = Sequence Name: 56322-704_101_SL_seq_12027
gggttcagcgggtgtgtgtg

SEQ ID NO: 12028 - DNA, 20 bp, Homo sapiens
  source 1..20: mol_type = genomic DNA; note = Gene: SEMA3B; note = Location (start to end; relative to TSS): SEMA3B_4_34; note = Orientation (relative to transcription): antisense; note = sgRNA Position: 50269157; note = Sequence Name: 56322-704_101_SL_seq_12028
tctgccccaggatctggaag

SEQ ID NO: 12029 - DNA, 20 bp, Homo sapiens
  source 1..20: mol_type = genomic DNA; note = Gene: SEMA3B; note = Location (start to end; relative to TSS): SEMA3B_47_77; note = Orientation (relative to transcription): antisense; note = sgRNA Position: 50269200; note = Sequence Name: 56322-704_101_SL_seq_12029
ttcagcgggtgtgtgtgtgg

SEQ ID NO: 12030 - DNA, 20 bp, Homo sapiens
  source 1..20: mol_type = genomic DNA; note = Gene: SEMA3C; note = Location (start to end; relative to TSS): SEMA3C_46_76; note = Orientation (relative to transcription): antisense; note = sgRNA Position: 80919001; note = Sequence Name: 56322-704_101_SL_seq_12030
atctcagcgctgcagtgccg

SEQ ID NO: 12031 - DNA, 20 bp, Homo sapiens
  source 1..20: mol_type = genomic DNA; note = Gene: SEMA3C; note = Location (start to end; relative to TSS): SEMA3C_106_136; note = Orientation (relative to transcription): sense; note = sgRNA Position: 80918921; note = Sequence Name: 56322-704_101_SL_seq_12031
ttgcgacgtgctagaaaata

SEQ ID NO: 12032 - DNA, 20 bp, Homo sapiens
  source 1..20: mol_type = genomic DNA; note = Gene: SEMA3C; note = Location (start to end; relative to TSS): SEMA3C_39_69; note = Orientation (relative to transcription): antisense; note = sgRNA Position: 80919008; note = Sequence Name: 56322-704_101_SL_seq_12032
cgctgcagtgccgcggcacc

SEQ ID NO: 12033 - DNA, 20 bp, Homo sapiens
  source 1..20: mol_type = genomic DNA; note = Gene: SEMA3C; note = Location (start to end; relative to TSS): SEMA3C_93_123; note = Orientation (relative to transcription): antisense; note = sgRNA Position: 80918954; note = Sequence Name: 56322-704_101_SL_seq_12033
aaggtgaaattctttcttcc

SEQ ID NO: 12034 - DNA, 20 bp, Homo sapiens
  source 1..20: mol_type = genomic DNA; note = Gene: SEMA3C; note = Location (start to end; relative to TSS): SEMA3C_20_50; note = Orientation (relative to transcription): sense; note = sgRNA Position: 80919007; note = Sequence Name: 56322-704_101_SL_seq_12034
gagaagagctccgggtgccg

SEQ ID NO: 12035 - DNA, 20 bp, Homo sapiens
  source 1..20: mol_type = genomic DNA; note = Gene: SEMA3C; note = Location (start to end; relative to TSS): SEMA3C_70_100; note = Orientation (relative to transcription): antisense; note = sgRNA Position: 80918977; note = Sequence Name: 56322-704_101_SL_seq_12035
tcctctgagtttctttgtaa

SEQ ID NO: 12036 - DNA, 20 bp, Homo sapiens
  source 1..20: mol_type = genomic DNA; note = Gene: SEMA3C; note = Location (start to end; relative to TSS): SEMA3C_12_42; note = Orientation (relative to transcription): sense; note = sgRNA Position: 80919015; note = Sequence Name: 56322-704_101_SL_seq_12036
gcgacgcggagaagagctcc

SEQ ID NO: 12037 - DNA, 20 bp, Homo sapiens
  source 1..20: mol_type = genomic DNA; note = Gene: SEMA3C; note = Location (start to end; relative to TSS): SEMA3C_60_90; note = Orientation (relative to transcription): sense; note = sgRNA Position: 80918967; note = Sequence Name: 56322-704_101_SL_seq_12037
tcctttacaaagaaactcag

SEQ ID NO: 12038 - DNA, 20 bp, Homo sapiens
  source 1..20: mol_type = genomic DNA; note = Gene: SEMA3C; note = Location (start to end; relative to TSS): SEMA3C_11_41; note = Orientation (relative to transcription): sense; note = sgRNA Position: 80919016; note = Sequence Name: 56322-704_101_SL_seq_12038
agcgacgcggagaagagctc

SEQ ID NO: 12039 - DNA, 20 bp, Homo sapiens
  source 1..20: mol_type = genomic DNA; note = Gene: SEMA3C; note = Location (start to end; relative to TSS): SEMA3C_46_76; note = Orientation (relative to transcription): antisense; note = sgRNA Position: 80919001; note = Sequence Name: 56322-704_101_SL_seq_12039
atctcagcgctgcagtgccg

SEQ ID NO: 12040 - DNA, 20 bp, Homo sapiens
  source 1..20: mol_type = genomic DNA; note = Gene: SEMA3D; note = Location (start to end; relative to TSS): SEMA3D_57_87; note = Orientation (relative to transcription): antisense; note = sgRNA Position: 85186995; note = Sequence Name: 56322-704_101_SL_seq_12040
gcacgctccaaacaggaggg

SEQ ID NO: 12041 - DNA, 20 bp, Homo sapiens
  source 1..20: mol_type = genomic DNA; note = Gene: SEMA3D; note = Location (start to end; relative to TSS): SEMA3D_87_117; note = Orientation (relative to transcription): sense; note = sgRNA Position: 85186945; note = Sequence Name: 56322-704_101_SL_seq_12041
ctcctccccaaagctccagc

SEQ ID NO: 12042 - DNA, 20 bp, Homo sapiens
  source 1..20: mol_type = genomic DNA; note = Gene: SEMA3D; note = Location (start to end; relative to TSS): SEMA3D_41_71; note = Orientation (relative to transcription): sense; note = sgRNA Position: 85186991; note = Sequence Name: 56322-704_101_SL_seq_12042
ttaaaagccgccctcctgtt

SEQ ID NO: 12043 - DNA, 20 bp, Homo sapiens
  source 1..20: mol_type = genomic DNA; note = Gene: SEMA3D; note = Location (start to end; relative to TSS): SEMA3D_84_114; note = Orientation (relative to transcription): antisense; note = sgRNA Position: 85186968; note = Sequence Name: 56322-704_101_SL_seq_12043
ttggggaggagagggtggcg

SEQ ID NO: 12044 - DNA, 20 bp, Homo sapiens
  source 1..20: mol_type = genomic DNA; note = Gene: SEMA3D; note = Location (start to end; relative to TSS): SEMA3D_42_72; note = Orientation (relative to transcription): antisense; note = sgRNA Position: 85187010; note = Sequence Name: 56322-704_101_SL_seq_12044
gagggcggcttttaagtttg

SEQ ID NO: 12045 - DNA, 20 bp, Homo sapiens
  source 1..20: mol_type = genomic DNA; note = Gene: SEMA3D; note = Location (start to end; relative to TSS): SEMA3D_79_109; note = Orientation (relative to transcription): antisense; note = sgRNA Position: 85186973; note = Sequence Name: 56322-704_101_SL_seq_12045
gaggagagggtggcgaggaa

SEQ ID NO: 12046 - DNA, 20 bp, Homo sapiens
  source 1..20: mol_type = genomic DNA; note = Gene: SEMA3D; note = Location (start to end; relative to TSS): SEMA3D_19_49; note = Orientation (relative to transcription): antisense; note = sgRNA Position: 85187033; note = Sequence Name: 56322-704_101_SL_seq_12046
tgtgaccgcagcagctgtcc

SEQ ID NO: 12047 - DNA, 20 bp, Homo sapiens
  source 1..20: mol_type = genomic DNA; note = Gene: SEMA3D; note = Location (start to end; relative to TSS): SEMA3D_60_90; note = Orientation (relative to transcription): antisense; note = sgRNA Position: 85186992; note = Sequence Name: 56322-704_101_SL_seq_12047
aaggcacgctccaaacagga

SEQ ID NO: 12048 - DNA, 20 bp, Homo sapiens
  source 1..20: mol_type = genomic DNA; note = Gene: SEMA3D; note = Location (start to end; relative to TSS): SEMA3D_18_48; note = Orientation (relative to transcription): antisense; note = sgRNA Position: 85187034; note = Sequence Name: 56322-704_101_SL_seq_12048
gtgaccgcagcagctgtcct

SEQ ID NO: 12049 - DNA, 20 bp, Homo sapiens
  source 1..20: mol_type = genomic DNA; note = Gene: SEMA3D; note = Location (start to end; relative to TSS): SEMA3D_57_87; note = Orientation (relative to transcription): antisense; note = sgRNA Position: 85186995; note = Sequence Name: 56322-704_101_SL_seq_12049
gcacgctccaaacaggaggg

SEQ ID NO: 12050 - DNA, 20 bp, Homo sapiens
  source 1..20: mol_type = genomic DNA; note = Gene: SEMA3E; note = Location (start to end; relative to TSS): SEMA3E_46_76; note = Orientation (relative to transcription): sense; note = sgRNA Position: 83649069; note = Sequence Name: 56322-704_101_SL_seq_12050
gtggatcctgcgactcctag

SEQ ID NO: 12051 - DNA, 20 bp, Homo sapiens
  source 1..20: mol_type = genomic DNA; note = Gene: SEMA3E; note = Location (start to end; relative to TSS): SEMA3E_106_136; note = Orientation (relative to transcription): sense; note = sgRNA Position: 83649009; note = Sequence Name: 56322-704_101_SL_seq_12051
gtgaattaaaactagcagtt

SEQ ID NO: 12052 - DNA, 20 bp, Homo sapiens
  source 1..20: mol_type = genomic DNA; note = Gene: SEMA3E; note = Location (start to end; relative to TSS): SEMA3E_29_59; note = Orientation (relative to transcription): antisense; note = sgRNA Position: 83649106; note = Sequence Name: 56322-704_101_SL_seq_12052
gcagggatgcagtctgtcag

SEQ ID NO: 12053 - DNA, 20 bp, Homo sapiens
  source 1..20: mol_type = genomic DNA; note = Gene: SEMA3E; note = Location (start to end; relative to TSS): SEMA3E_84_114; note = Orientation (relative to transcription): sense; note = sgRNA Position: 83649031; note = Sequence Name: 56322-704_101_SL_seq_12053
tttttaattagcaaggtgaa

SEQ ID NO: 12054 - DNA, 20 bp, Homo sapiens
  source 1..20: mol_type = genomic DNA; note = Gene: SEMA3E; note = Location (start to end; relative to TSS): SEMA3E_27_57; note = Orientation (relative to transcription): sense; note = sgRNA Position: 83649088; note = Sequence Name: 56322-704_101_SL_seq_12054
cagactgcatccctgctggg

SEQ ID NO: 12055 - DNA, 20 bp, Homo sapiens
  source 1..20: mol_type = genomic DNA; note = Gene: SEMA3E; note = Location (start to end; relative to TSS): SEMA3E_77_107; note = Orientation (relative to transcription): sense; note = sgRNA Position: 83649038; note = Sequence Name: 56322-704_101_SL_seq_12055
cttcttgtttttaattagca

SEQ ID NO: 12056 - DNA, 20 bp, Homo sapiens
  source 1..20: mol_type = genomic DNA; note = Gene: SEMA3E; note = Location (start to end; relative to TSS): SEMA3E_24_54; note = Orientation (relative to transcription): sense; note = sgRNA Position: 83649091; note = Sequence Name: 56322-704_101_SL_seq_12056
tgacagactgcatccctgct

SEQ ID NO: 12057 - DNA, 20 bp, Homo sapiens
  source 1..20: mol_type = genomic DNA; note = Gene: SEMA3E; note = Location (start to end; relative to TSS): SEMA3E_70_100; note = Orientation (relative to transcription): antisense; note = sgRNA Position: 83649065; note = Sequence Name: 56322-704_101_SL_seq_12057
caagaagtgccattccctct

SEQ ID NO: 12058 - DNA, 20 bp, Homo sapiens
  source 1..20: mol_type = genomic DNA; note = Gene: SEMA3E; note = Location (start to end; relative to TSS): SEMA3E_23_53; note = Orientation (relative to transcription): sense; note = sgRNA Position: 83649092; note = Sequence Name: 56322-704_101_SL_seq_12058
ctgacagactgcatccctgc

SEQ ID NO: 12059 - DNA, 20 bp, Homo sapiens
  source 1..20: mol_type = genomic DNA; note = Gene: SEMA3E; note = Location (start to end; relative to TSS): SEMA3E_61_91; note = Orientation (relative to transcription): antisense; note = sgRNA Position: 83649074; note = Sequence Name: 56322-704_101_SL_seq_12059
ccattccctctaggagtcgc

SEQ ID NO: 12060 - DNA, 20 bp, Homo sapiens
  source 1..20: mol_type = genomic DNA; note = Gene: SEMA3F; note = Location (start to end; relative to TSS): SEMA3F_42_72; note = Orientation (relative to transcription): antisense; note = sgRNA Position: 50155372; note = Sequence Name: 56322-704_101_SL_seq_12060
tcgggcgcgtcagcagccga

SEQ ID NO: 12061 - DNA, 20 bp, Homo sapiens
  source 1..20: mol_type = genomic DNA; note = Gene: SEMA3F; note = Location (start to end; relative to TSS): SEMA3F_85_115; note = Orientation (relative to transcription): antisense; note = sgRNA Position: 50155415; note = Sequence Name: 56322-704_101_SL_seq_12061
cgggatcggcgccgcggccg

SEQ ID NO: 12062 - DNA, 20 bp, Homo sapiens
  source 1..20: mol_type = genomic DNA; note = Gene: SEMA3F; note = Location (start to end; relative to TSS): SEMA3F_43_73; note = Orientation (relative to transcription): antisense; note = sgRNA Position: 50155373; note = Sequence Name: 56322-704_101_SL_seq_12062
ttcgggcgcgtcagcagccg

SEQ ID NO: 12063 - DNA, 20 bp, Homo sapiens
  source 1..20: mol_type = genomic DNA; note = Gene: SEMA3F; note = Location (start to end; relative to TSS): SEMA3F_83_113; note = Orientation (relative to transcription): sense; note = sgRNA Position: 50155433; note = Sequence Name: 56322-704_101_SL_seq_12063
cgcggcgccgatcccggctg

SEQ ID NO: 12064 - DNA, 20 bp, Homo sapiens
  source 1..20: mol_type = genomic DNA; note = Gene: SEMA3F; note = Location (start to end; relative to TSS): SEMA3F_25_55; note = Orientation (relative to transcription): antisense; note = sgRNA Position: 50155355; note = Sequence Name: 56322-704_101_SL_seq_12064
cgagggcccgggccccagcc

SEQ ID NO: 12065 - DNA, 20 bp, Homo sapiens
  source 1..20: mol_type = genomic DNA; note = Gene: SEMA3F; note = Location (start to end; relative to TSS): SEMA3F_60_90; note = Orientation (relative to transcription): antisense; note = sgRNA Position: 50155390; note = Sequence Name: 56322-704_101_SL_seq_12065
taaccggttccgcgggcttc

SEQ ID NO: 12066 - DNA, 20 bp, Homo sapiens
  source 1..20: mol_type = genomic DNA; note = Gene: SEMA3F; note = Location (start to end; relative to TSS): SEMA3F_24_54; note = Orientation (relative to transcription): antisense; note = sgRNA Position: 50155354; note = Sequence Name: 56322-704_101_SL_seq_12066
gagggcccgggccccagccc

SEQ ID NO: 12067 - DNA, 20 bp, Homo sapiens
  source 1..20: mol_type = genomic DNA; note = Gene: SEMA3F; note = Location (start to end; relative to TSS): SEMA3F_59_89; note = Orientation (relative to transcription): sense; note = sgRNA Position: 50155409; note = Sequence Name: 56322-704_101_SL_seq_12067
ccgcggaaccggttaagccg

SEQ ID NO: 12068 - DNA, 20 bp, Homo sapiens
  source 1..20: mol_type = genomic DNA; note = Gene: SEMA3F; note = Location (start to end; relative to TSS): SEMA3F_18_48; note = Orientation (relative to transcription): antisense; note = sgRNA Position: 50155348; note = Sequence Name: 56322-704_101_SL_seq_12068
ccgggccccagcccgggcca

SEQ ID NO: 12069 - DNA, 20 bp, Homo sapiens
  source 1..20: mol_type = genomic DNA; note = Gene: SEMA3F; note = Location (start to end; relative to TSS): SEMA3F_48_78; note = Orientation (relative to transcription): sense; note = sgRNA Position: 50155398; note = Sequence Name: 56322-704_101_SL_seq_12069
gcgcccgaagcccgcggaac

SEQ ID NO: 12070 - DNA, 20 bp, Homo sapiens
  source 1..20: mol_type = genomic DNA; note = Gene: SEMA3G; note = Location (start to end; relative to TSS): SEMA3G_49_79; note = Orientation (relative to transcription): sense; note = sgRNA Position: 52445030; note = Sequence Name: 56322-704_101_SL_seq_12070
gtgccctcagttccccagca

SEQ ID NO: 12071 - DNA, 20 bp, Homo sapiens
  source 1..20: mol_type = genomic DNA; note = Gene: SEMA3G; note = Location (start to end; relative to TSS): SEMA3G_81_111; note = Orientation (relative to transcription): antisense; note = sgRNA Position: 52445018; note = Sequence Name: 56322-704_101_SL_seq_12071
gcaaatggcccaggccgagg

SEQ ID NO: 12072 - DNA, 20 bp, Homo sapiens
  source 1..20: mol_type = genomic DNA; note = Gene: SEMA3G; note = Location (start to end; relative to TSS): SEMA3G_27_57; note = Orientation (relative to transcription): sense; note = sgRNA Position: 52445052; note = Sequence Name: 56322-704_101_SL_seq_12072
gctctgcaggcaggcggcag

SEQ ID NO: 12073 - DNA, 20 bp, Homo sapiens
  source 1..20: mol_type = genomic DNA; note = Gene: SEMA3G; note = Location (start to end; relative to TSS): SEMA3G_62_92; note = Orientation (relative to transcription): antisense; note = sgRNA Position: 52445037; note = Sequence Name: 56322-704_101_SL_seq_12073
ggggccatgctggggaactg

SEQ ID NO: 12074 - DNA, 20 bp, Homo sapiens
  source 1..20: mol_type = genomic DNA; note = Gene: SEMA3G; note = Location (start to end; relative to TSS): SEMA3G_21_51; note = Orientation (relative to transcription): sense; note = sgRNA Position: 52445058; note = Sequence Name: 56322-704_101_SL_seq_12074
agggcggctctgcaggcagg

SEQ ID NO: 12075 - DNA, 20 bp, Homo sapiens
  source 1..20: mol_type = genomic DNA; note = Gene: SEMA3G; note = Location (start to end; relative to TSS): SEMA3G_61_91; note = Orientation (relative to transcription): antisense; note = sgRNA Position: 52445038; note = Sequence Name: 56322-704_101_SL_seq_12075
gggccatgctggggaactga

SEQ ID NO: 12076 - DNA, 20 bp, Homo sapiens
  source 1..20: mol_type = genomic DNA; note = Gene: SEMA3G; note = Location (start to end; relative to TSS): SEMA3G_17_47; note = Orientation (relative to transcription): antisense; note = sgRNA Position: 52445082; note = Sequence Name: 56322-704_101_SL_seq_12076
gagccgccctctggtcccgc

SEQ ID NO: 12077 - DNA, 20 bp, Homo sapiens
  source 1..20: mol_type = genomic DNA; note = Gene: SEMA3G; note = Location (start to end; relative to TSS): SEMA3G_58_88; note = Orientation (relative to transcription): sense; note = sgRNA Position: 52445021; note = Sequence Name: 56322-704_101_SL_seq_12077
gttccccagcatggccccct

SEQ ID NO: 12078 - DNA, 20 bp, Homo sapiens
  source 1..20: mol_type = genomic DNA; note = Gene: SEMA3G; note = Location (start to end; relative to TSS): SEMA3G_10_40; note = Orientation (relative to transcription): antisense; note = sgRNA Position: 52445089; note = Sequence Name: 56322-704_101_SL_seq_12078
cctctggtcccgctggccgc

SEQ ID NO: 12079 - DNA, 20 bp, Homo sapiens
  source 1..20: mol_type = genomic DNA; note = Gene: SEMA3G; note = Location (start to end; relative to TSS): SEMA3G_49_79; note = Orientation (relative to transcription): sense; note = sgRNA Position: 52445030; note = Sequence Name: 56322-704_101_SL_seq_12079
gtgccctcagttccccagca

SEQ ID NO: 12080 - DNA, 20 bp, Homo sapiens
  source 1..20: mol_type = genomic DNA; note = Gene: SEMA4C; note = Location (start to end; relative to TSS): SEMA4C_26_56; note = Orientation (relative to transcription): sense; note = sgRNA Position: 96870030; note = Sequence Name: 56322-704_101_SL_seq_12080
ggagcccgagcctaggggcg

SEQ ID NO: 12081 - DNA, 20 bp, Homo sapiens
  source 1..20: mol_type = genomic DNA; note = Gene: SEMA4C; note = Location (start to end; relative to TSS): SEMA4C_79_109; note = Orientation (relative to transcription): sense; note = sgRNA Position: 96869977; note = Sequence Name: 56322-704_101_SL_seq_12081
agaggccgcggagggctggc

SEQ ID NO: 12082 - DNA, 20 bp, Homo sapiens
  source 1..20: mol_type = genomic DNA; note = Gene: SEMA4C; note = Location (start to end; relative to TSS): SEMA4C_21_51; note = Orientation (relative to transcription): sense; note = sgRNA Position: 96870035; note = Sequence Name: 56322-704_101_SL_seq_12082
cgcggggagcccgagcctag

SEQ ID NO: 12083 - DNA, 20 bp, Homo sapiens
  source 1..20: mol_type = genomic DNA; note = Gene: SEMA4C; note = Location (start to end; relative to TSS): SEMA4C_78_108; note = Orientation (relative to transcription): sense; note = sgRNA Position: 96869978; note = Sequence Name: 56322-704_101_SL_seq_12083
gagaggccgcggagggctgg

SEQ ID NO: 12084 - DNA, 20 bp, Homo sapiens
  source 1..20: mol_type = genomic DNA; note = Gene: SEMA4C; note = Location (start to end; relative to TSS): SEMA4C_18_48; note = Orientation (relative to transcription): antisense; note = sgRNA Position: 96870058; note = Sequence Name: 56322-704_101_SL_seq_12084
ggctccccgcgccaccacgg

SEQ ID NO: 12085 - DNA, 20 bp, Homo sapiens
  source 1..20: mol_type = genomic DNA; note = Gene: SEMA4C; note = Location (start to end; relative to TSS): SEMA4C_60_90; note = Orientation (relative to transcription): antisense; note = sgRNA Position: 96870016; note = Sequence Name: 56322-704_101_SL_seq_12085
accgcccctccgtccccgcc

SEQ ID NO: 12086 - DNA, 20 bp, Homo sapiens
  source 1..20: mol_type = genomic DNA; note = Gene: SEMA4C; note = Location (start to end; relative to TSS): SEMA4C_19_49; note = Orientation (relative to transcription): sense; note = sgRNA Position: 96870037; note = Sequence Name: 56322-704_101_SL_seq_12086
ggcgcggggagcccgagcct

SEQ ID NO: 12087 - DNA, 20 bp, Homo sapiens
  source 1..20: mol_type = genomic DNA; note = Gene: SEMA4C; note = Location (start to end; relative to TSS): SEMA4C_53_83; note = Orientation (relative to transcription): sense; note = sgRNA Position: 96870003; note = Sequence Name: 56322-704_101_SL_seq_12087
gggcggggacggaggggcgg

SEQ ID NO: 12088 - DNA, 20 bp, Homo sapiens
  source 1..20: mol_type = genomic DNA; note = Gene: SEMA4C; note = Location (start to end; relative to TSS): SEMA4C_20_50; note = Orientation (relative to transcription): sense; note = sgRNA Position: 96870036; note = Sequence Name: 56322-704_101_SL_seq_12088
gcgcggggagcccgagccta

SEQ ID NO: 12089 - DNA, 20 bp, Homo sapiens
  source 1..20: mol_type = genomic DNA; note = Gene: SEMA4C; note = Location (start to end; relative to TSS): SEMA4C_50_80; note = Orientation (relative to transcription): sense; note = sgRNA Position: 96870006; note = Sequence Name: 56322-704_101_SL_seq_12089
gccgggcggggacggagggg

SEQ ID NO: 12090 - DNA, 20 bp, Homo sapiens
  source 1..20: mol_type = genomic DNA; note = Gene: SEMA4D; note = Location (start to end; relative to TSS): SEMA4D_41_71; note = Orientation (relative to transcription): sense; note = sgRNA Position: 89498048; note = Sequence Name: 56322-704_101_SL_seq_12090
cagccgccgctgccgccgcc

SEQ ID NO: 12091 - DNA, 20 bp, Homo sapiens
  source 1..20: mol_type = genomic DNA; note = Gene: SEMA4D; note = Location (start to end; relative to TSS): SEMA4D_73_103; note = Orientation (relative to transcription): antisense; note = sgRNA Position: 89498036; note = Sequence Name: 56322-704_101_SL_seq_12091
ccggggagggggtggcgggg

SEQ ID NO: 12092 - DNA, 20 bp, Homo sapiens
  source 1..20: mol_type = genomic DNA; note = Gene: SEMA4D; note = Location (start to end; relative to TSS): SEMA4D_39_69; note = Orientation (relative to transcription): antisense; note = sgRNA Position: 89498070; note = Sequence Name: 56322-704_101_SL_seq_12092
cagcggcggctgggatgctg

SEQ ID NO: 12093 - DNA, 20 bp, Homo sapiens
  source 1..20: mol_type = genomic DNA; note = Gene: SEMA4D; note = Location (start to end; relative to TSS): SEMA4D_69_99; note = Orientation (relative to transcription): sense; note = sgRNA Position: 89498020; note = Sequence Name: 56322-704_101_SL_seq_12093
ccgccaccccctccccggcc

SEQ ID NO: 12094 - DNA, 20 bp, Homo sapiens
  source 1..20: mol_type = genomic DNA; note = Gene: SEMA4D; note = Location (start to end; relative to TSS): SEMA4D_21_51; note = Orientation (relative to transcription): antisense; note = sgRNA Position: 89498088; note = Sequence Name: 56322-704_101_SL_seq_12094
tgcggcgcgcgagagcgctg

SEQ ID NO: 12095 - DNA, 20 bp, Homo sapiens
  source 1..20: mol_type = genomic DNA; note = Gene: SEMA4D; note = Location (start to end; relative to TSS): SEMA4D_65_95; note = Orientation (relative to transcription): antisense; note = sgRNA Position: 89498044; note = Sequence Name: 56322-704_101_SL_seq_12095
ggggtggcggggaggcccgg

SEQ ID NO: 12096 - DNA, 20 bp, Homo sapiens
  source 1..20: mol_type = genomic DNA; note = Gene: SEMA4D; note = Location (start to end; relative to TSS): SEMA4D_17_47; note = Orientation (relative to transcription): antisense; note = sgRNA Position: 89498092; note = Sequence Name: 56322-704_101_SL_seq_12096
gcgcgcgagagcgctgaggc

SEQ ID NO: 12097 - DNA, 20 bp, Homo sapiens
  source 1..20: mol_type = genomic DNA; note = Gene: SEMA4D; note = Location (start to end; relative to TSS): SEMA4D_64_94; note = Orientation (relative to transcription): sense; note = sgRNA Position: 89498025; note = Sequence Name: 56322-704_101_SL_seq_12097
cctccccgccaccccctccc

SEQ ID NO: 12098 - DNA, 20 bp, Homo sapiens
  source 1..20: mol_type = genomic DNA; note = Gene: SEMA4D; note = Location (start to end; relative to TSS): SEMA4D_12_42; note = Orientation (relative to transcription): antisense; note = sgRNA Position: 89498097; note = Sequence Name: 56322-704_101_SL_seq_12098
cgagagcgctgaggccggcg

SEQ ID NO: 12099 - DNA, 20 bp, Homo sapiens
  source 1..20: mol_type = genomic DNA; note = Gene: SEMA4D; note = Location (start to end; relative to TSS): SEMA4D_62_92; note = Orientation (relative to transcription): antisense; note = sgRNA Position: 89498047; note = Sequence Name: 56322-704_101_SL_seq_12099
gtggcggggaggcccggcgg

SEQ ID NO: 12100 - DNA, 20 bp, Homo sapiens
  source 1..20: mol_type = genomic DNA; note = Gene: SEMA4G; note = Location (start to end; relative to TSS): SEMA4G_46_76; note = Orientation (relative to transcription): antisense; note = sgRNA Position: 100969556; note = Sequence Name: 56322-704_101_SL_seq_12100
gccatagagacagcgacgcg

SEQ ID NO: 12101 - DNA, 20 bp, Homo sapiens
  source 1..20: mol_type = genomic DNA; note = Gene: SEMA4G; note = Location (start to end; relative to TSS): SEMA4G_78_108; note = Orientation (relative to transcription): sense; note = sgRNA Position: 100969608; note = Sequence Name: 56322-704_101_SL_seq_12101
ggtgagcaaggcgaggagtg

SEQ ID NO: 12102 - DNA, 20 bp, Homo sapiens
  source 1..20: mol_type = genomic DNA; note = Gene: SEMA4G; note = Location (start to end; relative to TSS): SEMA4G_42_72; note = Orientation (relative to transcription): sense; note = sgRNA Position: 100969572; note = Sequence Name: 56322-704_101_SL_seq_12102
cgtcgctgtctctatggccc

SEQ ID NO: 12103 - DNA, 20 bp, Homo sapiens
  source 1..20: mol_type = genomic DNA; note = Gene: SEMA4G; note = Location (start to end; relative to TSS): SEMA4G_76_106; note = Orientation (relative to transcription): antisense; note = sgRNA Position: 100969586; note = Sequence Name: 56322-704_101_SL_seq_12103
gccttgctcacctttgcgct

SEQ ID NO: 12104 - DNA, 20 bp, Homo sapiens
  source 1..20: mol_type = genomic DNA; note = Gene: SEMA4G; note = Location (start to end; relative to TSS): SEMA4G_38_68; note = Orientation (relative to transcription): antisense; note = sgRNA Position: 100969548; note = Sequence Name: 56322-704_101_SL_seq_12104
gacagcgacgcgcggctccg

SEQ ID NO: 12105 - DNA, 20 bp, Homo sapiens
  source 1..20: mol_type = genomic DNA; note = Gene: SEMA4G; note = Location (start to end; relative to TSS): SEMA4G_68_98; note = Orientation (relative to transcription): antisense; note = sgRNA Position: 100969578; note = Sequence Name: 56322-704_101_SL_seq_12105
cacctttgcgctcggatccg

SEQ ID NO: 12106 - DNA, 20 bp, Homo sapiens
  source 1..20: mol_type = genomic DNA; note = Gene: SEMA4G; note = Location (start to end; relative to TSS): SEMA4G_36_66; note = Orientation (relative to transcription): sense; note = sgRNA Position: 100969566; note = Sequence Name: 56322-704_101_SL_seq_12106
gccgcgcgtcgctgtctcta

SEQ ID NO: 12107 - DNA, 20 bp, Homo sapiens
  source 1..20: mol_type = genomic DNA; note = Gene: SEMA4G; note = Location (start to end; relative to TSS): SEMA4G_66_96; note = Orientation (relative to transcription): sense; note = sgRNA Position: 100969596; note = Sequence Name: 56322-704_101_SL_seq_12107
tccgagcgcaaaggtgagca

SEQ ID NO: 12108 - DNA, 20 bp, Homo sapiens
  source 1..20: mol_type = genomic DNA; note = Gene: SEMA4G; note = Location (start to end; relative to TSS): SEMA4G_14_44; note = Orientation (relative to transcription): antisense; note = sgRNA Position: 100969524; note = Sequence Name: 56322-704_101_SL_seq_12108
cccacagcaccagctgcgag

SEQ ID NO: 12109 - DNA, 20 bp, Homo sapiens
  source 1..20: mol_type = genomic DNA; note = Gene: SEMA4G; note = Location (start to end; relative to TSS): SEMA4G_46_76; note = Orientation (relative to transcription): antisense; note = sgRNA Position: 100969556; note = Sequence Name: 56322-704_101_SL_seq_12109
gccatagagacagcgacgcg

SEQ ID NO: 12110 - DNA, 20 bp, Homo sapiens
  source 1..20: mol_type = genomic DNA; note = Gene: SEMA7A; note = Location (start to end; relative to TSS): SEMA7A_47_77; note = Orientation (relative to transcription): antisense; note = sgRNA Position: 74433907; note = Sequence Name: 56322-704_101_SL_seq_12110
gcggcacgtccgggcggagg

SEQ ID NO: 12111 - DNA, 20 bp, Homo sapiens
  source 1..20: mol_type = genomic DNA; note = Gene: SEMA7A; note = Location (start to end; relative to TSS): SEMA7A_87_117; note = Orientation (relative to transcription): sense; note = sgRNA Position: 74433847; note = Sequence Name: 56322-704_101_SL_seq_12111
ctggcccgccggctcggttg

SEQ ID NO: 12112 - DNA, 20 bp, Homo sapiens
  source 1..20: mol_type = genomic DNA; note = Gene: SEMA7A; note = Location (start to end; relative to TSS): SEMA7A_34_64; note = Orientation (relative to transcription): antisense; note = sgRNA Position: 74433920; note = Sequence Name: 56322-704_101_SL_seq_12112
gcggaggaggcgtcatcccg

SEQ ID NO: 12113 - DNA, 20 bp, Homo sapiens
  source 1..20: mol_type = genomic DNA; note = Gene: SEMA7A; note = Location (start to end; relative to TSS): SEMA7A_81_111; note = Orientation (relative to transcription): sense; note = sgRNA Position: 74433853; note = Sequence Name: 56322-704_101_SL_seq_12113
gcgtccctggcccgccggct

SEQ ID NO: 12114 - DNA, 20 bp, Homo sapiens
  source 1..20: mol_type = genomic DNA; note = Gene: SEMA7A; note = Location (start to end; relative to TSS): SEMA7A_29_59; note = Orientation (relative to transcription): sense; note = sgRNA Position: 74433905; note = Sequence Name: 56322-704_101_SL_seq_12114
gggatgacgcctcctccgcc

SEQ ID NO: 12115 - DNA, 20 bp, Homo sapiens
  source 1..20: mol_type = genomic DNA; note = Gene: SEMA7A; note = Location (start to end; relative to TSS): SEMA7A_80_110; note = Orientation (relative to transcription): antisense; note = sgRNA Position: 74433874; note = Sequence Name: 56322-704_101_SL_seq_12115
gggccagggacgcgggcgcg

SEQ ID NO: 12116 - DNA, 20 bp, Homo sapiens
  source 1..20: mol_type = genomic DNA; note = Gene: SEMA7A; note = Location (start to end; relative to TSS): SEMA7A_28_58; note = Orientation (relative to transcription): antisense; note = sgRNA Position: 74433926; note = Sequence Name: 56322-704_101_SL_seq_12116
gaggcgtcatcccgtggccc

SEQ ID NO: 12117 - DNA, 20 bp, Homo sapiens
  source 1..20: mol_type = genomic DNA; note = Gene: SEMA7A; note = Location (start to end; relative to TSS): SEMA7A_76_106; note = Orientation (relative to transcription): sense; note = sgRNA Position: 74433858; note = Sequence Name: 56322-704_101_SL_seq_12117
cgcccgcgtccctggcccgc

SEQ ID NO: 12118 - DNA, 20 bp, Homo sapiens
  source 1..20: mol_type = genomic DNA; note = Gene: SEMA7A; note = Location (start to end; relative to TSS): SEMA7A_27_57; note = Orientation (relative to transcription): antisense; note = sgRNA Position: 74433927; note = Sequence Name: 56322-704_101_SL_seq_12118
aggcgtcatcccgtggcccc

SEQ ID NO: 12119 - DNA, 20 bp, Homo sapiens
  source 1..20: mol_type = genomic DNA; note = Gene: SEMA7A; note = Location (start to end; relative to TSS): SEMA7A_68_98; note = Orientation (relative to transcription): sense; note = sgRNA Position: 74433866; note = Sequence Name: 56322-704_101_SL_seq_12119
gcaccgcgcgcccgcgtccc

SEQ ID NO: 12120 - DNA, 20 bp, Homo sapiens
  source 1..20: mol_type = genomic DNA; note = Gene: SIGIRR; note = Location (start to end; relative to TSS): SIGIRR_40_70; note = Orientation (relative to transcription): antisense; note = sgRNA Position: 414955; note = Sequence Name: 56322-704_101_SL_seq_12120
atgcatcgccaagcgcggtg

SEQ ID NO: 12121 - DNA, 20 bp, Homo sapiens
  source 1..20: mol_type = genomic DNA; note = Gene: SIGIRR; note = Location (start to end; relative to TSS): SIGIRR_79_109; note = Orientation (relative to transcription): sense; note = sgRNA Position: 414896; note = Sequence Name: 56322-704_101_SL_seq_12121
actccctggggcccagcgaa

SEQ ID NO: 12122 - DNA, 20 bp, Homo sapiens
  source 1..20: mol_type = genomic DNA; note = Gene: SIGIRR; note = Location (start to end; relative to TSS): SIGIRR_42_72; note = Orientation (relative to transcription): antisense; note = sgRNA Position: 414953; note = Sequence Name: 56322-704_101_SL_seq_12122
ggatgcatcgccaagcgcgg

SEQ ID NO: 12123 - DNA, 20 bp, Homo sapiens
  source 1..20: mol_type = genomic DNA; note = Gene: SIGIRR; note = Location (start to end; relative to TSS): SIGIRR_78_108; note = Orientation (relative to transcription): sense; note = sgRNA Position: 414897; note = Sequence Name: 56322-704_101_SL_seq_12123
cactccctggggcccagcga

SEQ ID NO: 12124 - DNA, 20 bp, Homo sapiens
  source 1..20: mol_type = genomic DNA; note = Gene: SIGIRR; note = Location (start to end; relative to TSS): SIGIRR_41_71; note = Orientation (relative to transcription): antisense; note = sgRNA Position: 414954; note = Sequence Name: 56322-704_101_SL_seq_12124
gatgcatcgccaagcgcggt

SEQ ID NO: 12125 - DNA, 20 bp, Homo sapiens
  source 1..20: mol_type = genomic DNA; note = Gene: SIGIRR; note = Location (start to end; relative to TSS): SIGIRR_72_102; note = Orientation (relative to transcription): antisense; note = sgRNA Position: 414923; note = Sequence Name: 56322-704_101_SL_seq_12125
agggagtgtccacagcacca

SEQ ID NO: 12126 - DNA, 20 bp, Homo sapiens
  source 1..20: mol_type = genomic DNA; note = Gene: SIGIRR; note = Location (start to end; relative to TSS): SIGIRR_34_64; note = Orientation (relative to transcription): antisense; note = sgRNA Position: 414961; note = Sequence Name: 56322-704_101_SL_seq_12126
cgccaagcgcggtggggacc

SEQ ID NO: 12127 - DNA, 20 bp, Homo sapiens
  source 1..20: mol_type = genomic DNA; note = Gene: SIGIRR; note = Location (start to end; relative to TSS): SIGIRR_65_95; note = Orientation (relative to transcription): sense; note = sgRNA Position: 414910; note = Sequence Name: 56322-704_101_SL_seq_12127
ttggtgctgtggacactccc

SEQ ID NO: 12128 - DNA, 20 bp, Homo sapiens
  source 1..20: mol_type = genomic DNA; note = Gene: SIGIRR; note = Location (start to end; relative to TSS): SIGIRR_23_53; note = Orientation (relative to transcription): sense; note = sgRNA Position: 414952; note = Sequence Name: 56322-704_101_SL_seq_12128
agccaggtccccaccgcgct

SEQ ID NO: 12129 - DNA, 20 bp, Homo sapiens
  source 1..20: mol_type = genomic DNA; note = Gene: SIGIRR; note = Location (start to end; relative to TSS): SIGIRR_54_84; note = Orientation (relative to transcription): sense; note = sgRNA Position: 414921; note = Sequence Name: 56322-704_101_SL_seq_12129
ccatagcagccttggtgctg

SEQ ID NO: 12130 - DNA, 20 bp, Homo sapiens
  source 1..20: mol_type = genomic DNA; note = Gene: SIGLEC1; note = Location (start to end; relative to TSS): SIGLEC1_44_74; note = Orientation (relative to transcription): antisense; note = sgRNA Position: 3712552; note = Sequence Name: 56322-704_101_SL_seq_12130
ccaagagctcctggtgcagc

SEQ ID NO: 12131 - DNA, 20 bp, Homo sapiens
  source 1..20: mol_type = genomic DNA; note = Gene: SIGLEC1; note = Location (start to end; relative to TSS): SIGLEC1_83_113; note = Orientation (relative to transcription): antisense; note = sgRNA Position: 3712513; note = Sequence Name: 56322-704_101_SL_seq_12131
gcggtgctggacctgcggag

SEQ ID NO: 12132 - DNA, 20 bp, Homo sapiens
  source 1..20: mol_type = genomic DNA; note = Gene: SIGLEC1; note = Location (start to end; relative to TSS): SIGLEC1_35_65; note = Orientation (relative to transcription): sense; note = sgRNA Position: 3712541; note = Sequence Name: 56322-704_101_SL_seq_12132
ccagctgcaccaggagctct

SEQ ID NO: 12133 - DNA, 20 bp, Homo sapiens
  source 1..20: mol_type = genomic DNA; note = Gene: SIGLEC1; note = Location (start to end; relative to TSS): SIGLEC1_75_105; note = Orientation (relative to transcription): antisense; note = sgRNA Position: 3712521; note = Sequence Name: 56322-704_101_SL_seq_12133
ggacctgcggagaggagaac

SEQ ID NO: 12134 - DNA, 20 bp, Homo sapiens
  source 1..20: mol_type = genomic DNA; note = Gene: SIGLEC1; note = Location (start to end; relative to TSS): SIGLEC1_34_64; note = Orientation (relative to transcription): antisense; note = sgRNA Position: 3712562; note = Sequence Name: 56322-704_101_SL_seq_12134
ctggtgcagctggctcccca

SEQ ID NO: 12135 - DNA, 20 bp, Homo sapiens
  source 1..20: mol_type = genomic DNA; note = Gene: SIGLEC1; note = Location (start to end; relative to TSS): SIGLEC1_71_101; note = Orientation (relative to transcription): antisense; note = sgRNA Position: 3712525; note = Sequence Name: 56322-704_101_SL_seq_12135
ctgcggagaggagaacagga

SEQ ID NO: 12136 - DNA, 20 bp, Homo sapiens
  source 1..20: mol_type = genomic DNA; note = Gene: SIGLEC1; note = Location (start to end; relative to TSS): SIGLEC1_26_56; note = Orientation (relative to transcription): sense; note = sgRNA Position: 3712550; note = Sequence Name: 56322-704_101_SL_seq_12136
cctggggagccagctgcacc

SEQ ID NO: 12137 - DNA, 20 bp, Homo sapiens
  source 1..20: mol_type = genomic DNA; note = Gene: SIGLEC1; note = Location (start to end; relative to TSS): SIGLEC1_67_97; note = Orientation (relative to transcription): antisense; note = sgRNA Position: 3712529; note = Sequence Name: 56322-704_101_SL_seq_12137
ggagaggagaacaggaagga

SEQ ID NO: 12138 - DNA, 20 bp, Homo sapiens
  source 1..20: mol_type = genomic DNA; note = Gene: SIGLEC1; note = Location (start to end; relative to TSS): SIGLEC1_25_55; note = Orientation (relative to transcription): antisense; note = sgRNA Position: 3712571; note = Sequence Name: 56322-704_101_SL_seq_12138
ctggctccccagggctctgc

SEQ ID NO: 12139 - DNA, 20 bp, Homo sapiens
  source 1..20: mol_type = genomic DNA; note = Gene: SIGLEC1; note = Location (start to end; relative to TSS): SIGLEC1_63_93; note = Orientation (relative to transcription): sense; note = sgRNA Position: 3712513; note = Sequence Name: 56322-704_101_SL_seq_12139
cttcctgttctcctctccgc

SEQ ID NO: 12140 - DNA, 20 bp, Homo sapiens
  source 1..20: mol_type = genomic DNA; note = Gene: SIGLEC10; note = Location (start to end; relative to TSS): SIGLEC10_48_78; note = Orientation (relative to transcription): antisense; note = sgRNA Position: 51417590; note = Sequence Name: 56322-704_101_SL_seq_12140
cagtagcatctccgcatagg

SEQ ID NO: 12141 - DNA, 20 bp, Homo sapiens
  source 1..20: mol_type = genomic DNA; note = Gene: SIGLEC10; note = Location (start to end; relative to TSS): SIGLEC10_82_112; note = Orientation (relative to transcription): sense; note = sgRNA Position: 51417536; note = Sequence Name: 56322-704_101_SL_seq_12141
gctgggcggtgagtgggcca

SEQ ID NO: 12142 - DNA, 20 bp, Homo sapiens
  source 1..20: mol_type = genomic DNA; note = Gene: SIGLEC10; note = Location (start to end; relative to TSS): SIGLEC10_42_72; note = Orientation (relative to transcription): antisense; note = sgRNA Position: 51417596; note = Sequence Name: 56322-704_101_SL_seq_12142
catctccgcataggaggcgc

SEQ ID NO: 12143 - DNA, 20 bp, Homo sapiens
  source 1..20: mol_type = genomic DNA; note = Gene: SIGLEC10; note = Location (start to end; relative to TSS): SIGLEC10_75_105; note = Orientation (relative to transcription): sense; note = sgRNA Position: 51417543; note = Sequence Name: 56322-704_101_SL_seq_12143
cctcgctgctgggcggtgag

SEQ ID NO: 12144 - DNA, 20 bp, Homo sapiens
  source 1..20: mol_type = genomic DNA; note = Gene: SIGLEC10; note = Location (start to end; relative to TSS): SIGLEC10_41_71; note = Orientation (relative to transcription): antisense; note = sgRNA Position: 51417597; note = Sequence Name: 56322-704_101_SL_seq_12144
atctccgcataggaggcgca

SEQ ID NO: 12145 - DNA, 20 bp, Homo sapiens
  source 1..20: mol_type = genomic DNA; note = Gene: SIGLEC10; note = Location (start to end; relative to TSS): SIGLEC10_71_101; note = Orientation (relative to transcription): antisense; note = sgRNA Position: 51417567; note = Sequence Name: 56322-704_101_SL_seq_12145
agcagcgaggacagcagcag

SEQ ID NO: 12146 - DNA, 20 bp, Homo sapiens
  source 1..20: mol_type = genomic DNA; note = Gene: SIGLEC10; note = Location (start to end; relative to TSS): SIGLEC10_28_58; note = Orientation (relative to transcription): sense; note = sgRNA Position: 51417590; note = Sequence Name: 56322-704_101_SL_seq_12146
caggccctgcgcctcctatg

SEQ ID NO: 12147 - DNA, 20 bp, Homo sapiens
  source 1..20: mol_type = genomic DNA; note = Gene: SIGLEC10; note = Location (start to end; relative to TSS): SIGLEC10_68_98; note = Orientation (relative to transcription): sense; note = sgRNA Position: 51417550; note = Sequence Name: 56322-704_101_SL_seq_12147
ctgctgtcctcgctgctggg

SEQ ID NO: 12148 - DNA, 20 bp, Homo sapiens
  source 1..20: mol_type = genomic DNA; note = Gene: SIGLEC10; note = Location (start to end; relative to TSS): SIGLEC10_26_56; note = Orientation (relative to transcription): antisense; note = sgRNA Position: 51417612; note = Sequence Name: 56322-704_101_SL_seq_12148
gcgcagggcctgcctgagac

SEQ ID NO: 12149 - DNA, 20 bp, Homo sapiens
  source 1..20: mol_type = genomic DNA; note = Gene: SIGLEC10; note = Location (start to end; relative to TSS): SIGLEC10_65_95; note = Orientation (relative to transcription): sense; note = sgRNA Position: 51417553; note = Sequence Name: 56322-704_101_SL_seq_12149
ctgctgctgtcctcgctgct

SEQ ID NO: 12150 - DNA, 20 bp, Homo sapiens
  source 1..20: mol_type = genomic DNA; note = Gene: SIGLEC11; note = Location (start to end; relative to TSS): SIGLEC11_32_62; note = Orientation (relative to transcription): antisense; note = sgRNA Position: 49961136; note = Sequence Name: 56322-704_101_SL_seq_12150
tccagcaggaagcctggtgg

SEQ ID NO: 12151 - DNA, 20 bp, Homo sapiens
  source 1..20: mol_type = genomic DNA; note = Gene: SIGLEC11; note = Location (start to end; relative to TSS): SIGLEC11_76_106; note = Orientation (relative to transcription): antisense; note = sgRNA Position: 49961092; note = Sequence Name: 56322-704_101_SL_seq_12151
ggaccatctggcttctgggc

SEQ ID NO: 12152 - DNA, 20 bp, Homo sapiens
  source 1..20: mol_type = genomic DNA; note = Gene: SIGLEC11; note = Location (start to end; relative to TSS): SIGLEC11_31_61; note = Orientation (relative to transcription): antisense; note = sgRNA Position: 49961137; note = Sequence Name: 56322-704_101_SL_seq_12152
ccagcaggaagcctggtgga

SEQ ID NO: 12153 - DNA, 20 bp, Homo sapiens
  source 1..20: mol_type = genomic DNA; note = Gene: SIGLEC11; note = Location (start to end; relative to TSS): SIGLEC11_71_101; note = Orientation (relative to transcription): sense; note = sgRNA Position: 49961077; note = Sequence Name: 56322-704_101_SL_seq_12153
cccagaagccagatggtccc

SEQ ID NO: 12154 - DNA, 20 bp, Homo sapiens
  source 1..20: mol_type = genomic DNA; note = Gene: SIGLEC11; note = Location (start to end; relative to TSS): SIGLEC11_30_60; note = Orientation (relative to transcription): antisense; note = sgRNA Position: 49961138; note = Sequence Name: 56322-704_101_SL_seq_12154
cagcaggaagcctggtggag

SEQ ID NO: 12155 - DNA, 20 bp, Homo sapiens
  source 1..20: mol_type = genomic DNA; note = Gene: SIGLEC11; note = Location (start to end; relative to TSS): SIGLEC11_70_100; note = Orientation (relative to transcription): sense; note = sgRNA Position: 49961078; note = Sequence Name: 56322-704_101_SL_seq_12155
gcccagaagccagatggtcc

SEQ ID NO: 12156 - DNA, 20 bp, Homo sapiens
  source 1..20: mol_type = genomic DNA; note = Gene: SIGLEC11; note = Location (start to end; relative to TSS): SIGLEC11_25_55; note = Orientation (relative to transcription): sense; note = sgRNA Position: 49961123; note = Sequence Name: 56322-704_101_SL_seq_12156
tccaccaggcttcctgctgg

SEQ ID NO: 12157 - DNA, 20 bp, Homo sapiens
  source 1..20: mol_type = genomic DNA; note = Gene: SIGLEC11; note = Location (start to end; relative to TSS): SIGLEC11_66_96; note = Orientation (relative to transcription): antisense; note = sgRNA Position: 49961102; note = Sequence Name: 56322-704_101_SL_seq_12157
gcttctgggccggcctggct

SEQ ID NO: 12158 - DNA, 20 bp, Homo sapiens
  source 1..20: mol_type = genomic DNA; note = Gene: SIGLEC11; note = Location (start to end; relative to TSS): SIGLEC11_22_52; note = Orientation (relative to transcription): sense; note = sgRNA Position: 49961126; note = Sequence Name: 56322-704_101_SL_seq_12158
ccctccaccaggcttcctgc

SEQ ID NO: 12159 - DNA, 20 bp, Homo sapiens
  source 1..20: mol_type = genomic DNA; note = Gene: SIGLEC11; note = Location (start to end; relative to TSS): SIGLEC11_62_92; note = Orientation (relative to transcription): antisense; note = sgRNA Position: 49961106; note = Sequence Name: 56322-704_101_SL_seq_12159
ctgggccggcctggctggga

SEQ ID NO: 12160 - DNA, 20 bp, Homo sapiens
  source 1..20: mol_type = genomic DNA; note = Gene: SIGLEC12; note = Location (start to end; relative to TSS): SIGLEC12_36_66; note = Orientation (relative to transcription): antisense; note = sgRNA Position: 51501760; note = Sequence Name: 56322-704_101_SL_seq_12160
tggaggtgccagggttgctg

SEQ ID NO: 12161 - DNA, 20 bp, Homo sapiens
  source 1..20: mol_type = genomic DNA; note = Gene: SIGLEC12; note = Location (start to end; relative to TSS): SIGLEC12_85_115; note = Orientation (relative to transcription): sense; note = sgRNA Position: 51501691; note = Sequence Name: 56322-704_101_SL_seq_12161
acccctgctctgtgggagag

SEQ ID NO: 12162 - DNA, 20 bp, Homo sapiens
  source 1..20: mol_type = genomic DNA; note = Gene: SIGLEC12; note = Location (start to end; relative to TSS): SIGLEC12_45_75; note = Orientation (relative to transcription): antisense; note = sgRNA Position: 51501751; note = Sequence Name: 56322-704_101_SL_seq_12162
gtgtcgggttggaggtgcca

SEQ ID NO: 12163 - DNA, 20 bp, Homo sapiens
  source 1..20: mol_type = genomic DNA; note = Gene: SIGLEC12; note = Location (start to end; relative to TSS): SIGLEC12_78_108; note = Orientation (relative to transcription): sense; note = sgRNA Position: 51501698; note = Sequence Name: 56322-704_101_SL_seq_12163
tgctgccacccctgctctgt

SEQ ID NO: 12164 - DNA, 20 bp, Homo sapiens
  source 1..20: mol_type = genomic DNA; note = Gene: SIGLEC12; note = Location (start to end; relative to TSS): SIGLEC12_46_76; note = Orientation (relative to transcription): antisense; note = sgRNA Position: 51501750; note = Sequence Name: 56322-704_101_SL_seq_12164
tgtgtcgggttggaggtgcc

SEQ ID NO: 12165 - DNA, 20 bp, Homo sapiens
  source 1..20: mol_type = genomic DNA; note = Gene: SIGLEC12; note = Location (start to end; relative to TSS): SIGLEC12_77_107; note = Orientation (relative to transcription): sense; note = sgRNA Position: 51501699; note = Sequence Name: 56322-704_101_SL_seq_12165
ctgctgccacccctgctctg

SEQ ID NO: 12166 - DNA, 20 bp, Homo sapiens
  source 1..20: mol_type = genomic DNA; note = Gene: SIGLEC12; note = Location (start to end; relative to TSS): SIGLEC12_18_48; note = Orientation (relative to transcription): antisense; note = sgRNA Position: 51501778; note = Sequence Name: 56322-704_101_SL_seq_12166
tgaggtaagtctgttcctca

SEQ ID NO: 12167 - DNA, 20 bp, Homo sapiens
  source 1..20: mol_type = genomic DNA; note = Gene: SIGLEC12; note = Location (start to end; relative to TSS): SIGLEC12_56_86; note = Orientation (relative to transcription): antisense; note = sgRNA Position: 51501740; note = Sequence Name: 56322-704_101_SL_seq_12167
agcagtagcatgtgtcgggt

SEQ ID NO: 12168 - DNA, 20 bp, Homo sapiens
  source 1..20: mol_type = genomic DNA; note = Gene: SIGLEC12; note = Location (start to end; relative to TSS): SIGLEC12_19_49; note = Orientation (relative to transcription): sense; note = sgRNA Position: 51501757; note = Sequence Name: 56322-704_101_SL_seq_12168
cagacttacctcagcaaccc

SEQ ID NO: 12169 - DNA, 20 bp, Homo sapiens
  source 1..20: mol_type = genomic DNA; note = Gene: SIGLEC12; note = Location (start to end; relative to TSS): SIGLEC12_53_83; note = Orientation (relative to transcription): antisense; note = sgRNA Position: 51501743; note = Sequence Name: 56322-704_101_SL_seq_12169
agtagcatgtgtcgggttgg

SEQ ID NO: 12170 - DNA, 20 bp, Homo sapiens
  source 1..20: mol_type = genomic DNA; note = Gene: SIGLEC14; note = Location (start to end; relative to TSS): SIGLEC14_27_57; note = Orientation (relative to transcription): antisense; note = sgRNA Position: 51646794; note = Sequence Name: 56322-704_101_SL_seq_12170
ccccagcccagtcccaggtc

SEQ ID NO: 12171 - DNA, 20 bp, Homo sapiens
  source 1..20: mol_type = genomic DNA; note = Gene: SIGLEC14; note = Location (start to end; relative to TSS): SIGLEC14_70_100; note = Orientation (relative to transcription): sense; note = sgRNA Position: 51646731; note = Sequence Name: 56322-704_101_SL_seq_12171
ctgctgctgcccctgctgtg

SEQ ID NO: 12172 - DNA, 20 bp, Homo sapiens
  source 1..20: mol_type = genomic DNA; note = Gene: SIGLEC14; note = Location (start to end; relative to TSS): SIGLEC14_32_62; note = Orientation (relative to transcription): antisense; note = sgRNA Position: 51646789; note = Sequence Name: 56322-704_101_SL_seq_12172
cagggccccagcccagtccc

SEQ ID NO: 12173 - DNA, 20 bp, Homo sapiens
  source 1..20: mol_type = genomic DNA; note = Gene: SIGLEC14; note = Location (start to end; relative to TSS): SIGLEC14_69_99; note = Orientation (relative to transcription): sense; note = sgRNA Position: 51646732; note = Sequence Name: 56322-704_101_SL_seq_12173
gctgctgctgcccctgctgt

SEQ ID NO: 12174 - DNA, 20 bp, Homo sapiens
  source 1..20: mol_type = genomic DNA; note = Gene: SIGLEC14; note = Location (start to end; relative to TSS): SIGLEC14_18_48; note = Orientation (relative to transcription): antisense; note = sgRNA Position: 51646803; note = Sequence Name: 56322-704_101_SL_seq_12174
agtcccaggtccggctgtca

SEQ ID NO: 12175 - DNA, 20 bp, Homo sapiens
  source 1..20: mol_type = genomic DNA; note = Gene: SIGLEC14; note = Location (start to end; relative to TSS): SIGLEC14_68_98; note = Orientation (relative to transcription): sense; note = sgRNA Position: 51646733; note = Sequence Name: 56322-704_101_SL_seq_12175
tgctgctgctgcccctgctg

SEQ ID NO: 12176 - DNA, 20 bp, Homo sapiens
  source 1..20: mol_type = genomic DNA; note = Gene: SIGLEC14; note = Location (start to end; relative to TSS): SIGLEC14_19_49; note = Orientation (relative to transcription): antisense; note = sgRNA Position: 51646802; note = Sequence Name: 56322-704_101_SL_seq_12176
cagtcccaggtccggctgtc

SEQ ID NO: 12177 - DNA, 20 bp, Homo sapiens
  source 1..20: mol_type = genomic DNA; note = Gene: SIGLEC14; note = Location (start to end; relative to TSS): SIGLEC14_51_81; note = Orientation (relative to transcription): antisense; note = sgRNA Position: 51646770; note = Sequence Name: 56322-704_101_SL_seq_12177
gcagcatgtctccatccgcc

SEQ ID NO: 12178 - DNA, 20 bp, Homo sapiens
  source 1..20: mol_type = genomic DNA; note = Gene: SIGLEC14; note = Location (start to end; relative to TSS): SIGLEC14_16_46; note = Orientation (relative to transcription): sense; note = sgRNA Position: 51646785; note = Sequence Name: 56322-704_101_SL_seq_12178
agccggacctgggactgggc

SEQ ID NO: 12179 - DNA, 20 bp, Homo sapiens
  source 1..20: mol_type = genomic DNA; note = Gene: SIGLEC14; note = Location (start to end; relative to TSS): SIGLEC14_50_80; note = Orientation (relative to transcription): antisense; note = sgRNA Position: 51646771; note = Sequence Name: 56322-704_101_SL_seq_12179
cagcatgtctccatccgcca

SEQ ID NO: 12180 - DNA, 20 bp, Homo sapiens
  source 1..20: mol_type = genomic DNA; note = Gene: SIGLEC15; note = Location (start to end; relative to TSS): SIGLEC15_47_77; note = Orientation (relative to transcription): sense; note = sgRNA Position: 45825748; note = Sequence Name: 56322-704_101_SL_seq_12180
ggaaaagtccatctggctgc

SEQ ID NO: 12181 - DNA, 20 bp, Homo sapiens
  source 1..20: mol_type = genomic DNA; note = Gene: SIGLEC15; note = Location (start to end; relative to TSS): SIGLEC15_79_109; note = Orientation (relative to transcription): antisense; note = sgRNA Position: 45825760; note = Sequence Name: 56322-704_101_SL_seq_12181
cgggagaacccacgccaagc

SEQ ID NO: 12182 - DNA, 20 bp, Homo sapiens
  source 1..20: mol_type = genomic DNA; note = Gene: SIGLEC15; note = Location (start to end; relative to TSS): SIGLEC15_40_70; note = Orientation (relative to transcription): sense; note = sgRNA Position: 45825741; note = Sequence Name: 56322-704_101_SL_seq_12182
acagcatggaaaagtccatc

SEQ ID NO: 12183 - DNA, 20 bp, Homo sapiens
  source 1..20: mol_type = genomic DNA; note = Gene: SIGLEC15; note = Location (start to end; relative to TSS): SIGLEC15_75_105; note = Orientation (relative to transcription): sense; note = sgRNA Position: 45825776; note = Sequence Name: 56322-704_101_SL_seq_12183
ttggcgtgggttctcccgac

SEQ ID NO: 12184 - DNA, 20 bp, Homo sapiens
  source 1..20: mol_type = genomic DNA; note = Gene: SIGLEC15; note = Location (start to end; relative to TSS): SIGLEC15_29_59; note = Orientation (relative to transcription): antisense; note = sgRNA Position: 45825710; note = Sequence Name: 56322-704_101_SL_seq_12184
tgtgagcatctgaacacccc

SEQ ID NO: 12185 - DNA, 20 bp, Homo sapiens
  source 1..20: mol_type = genomic DNA; note = Gene: SIGLEC15; note = Location (start to end; relative to TSS): SIGLEC15_61_91; note = Orientation (relative to transcription): sense; note = sgRNA Position: 45825762; note = Sequence Name: 56322-704_101_SL_seq_12185
ggctgctggcctgcttggcg

SEQ ID NO: 12186 - DNA, 20 bp, Homo sapiens
  source 1..20: mol_type = genomic DNA; note = Gene: SIGLEC15; note = Location (start to end; relative to TSS): SIGLEC15_26_56; note = Orientation (relative to transcription): sense; note = sgRNA Position: 45825727; note = Sequence Name: 56322-704_101_SL_seq_12186
gtgttcagatgctcacagca

SEQ ID NO: 12187 - DNA, 20 bp, Homo sapiens
  source 1..20: mol_type = genomic DNA; note = Gene: SIGLEC15; note = Location (start to end; relative to TSS): SIGLEC15_56_86; note = Orientation (relative to transcription): sense; note = sgRNA Position: 45825757; note = Sequence Name: 56322-704_101_SL_seq_12187
catctggctgctggcctgct

SEQ ID NO: 12188 - DNA, 20 bp, Homo sapiens
  source 1..20: mol_type = genomic DNA; note = Gene: SIGLEC15; note = Location (start to end; relative to TSS): SIGLEC15_13_43; note = Orientation (relative to transcription): antisense; note = sgRNA Position: 45825694; note = Sequence Name: 56322-704_101_SL_seq_12188
ccccaggccagacccgctct

SEQ ID NO: 12189 - DNA, 20 bp, Homo sapiens
  source 1..20: mol_type = genomic DNA; note = Gene: SIGLEC15; note = Location (start to end; relative to TSS): SIGLEC15_47_77; note = Orientation (relative to transcription): sense; note = sgRNA Position: 45825748; note = Sequence Name: 56322-704_101_SL_seq_12189
ggaaaagtccatctggctgc

SEQ ID NO: 12190 - DNA, 20 bp, Homo sapiens
  source 1..20: mol_type = genomic DNA; note = Gene: SIGLEC16; note = Location (start to end; relative to TSS): SIGLEC16_42_72; note = Orientation (relative to transcription): sense; note = sgRNA Position: 49969732; note = Sequence Name: 56322-704_101_SL_seq_12190
ccctgctgctgcccgtgctg

SEQ ID NO: 12191 - DNA, 20 bp, Homo sapiens
  source 1..20: mol_type = genomic DNA; note = Gene: SIGLEC16; note = Location (start to end; relative to TSS): SIGLEC16_81_111; note = Orientation (relative to transcription): sense; note = sgRNA Position: 49969771; note = Sequence Name: 56322-704_101_SL_seq_12191
gtggctgggggtcccaggca

SEQ ID NO: 12192 - DNA, 20 bp, Homo sapiens
  source 1..20: mol_type = genomic DNA; note = Gene: SIGLEC16; note = Location (start to end; relative to TSS): SIGLEC16_43_73; note = Orientation (relative to transcription): sense; note = sgRNA Position: 49969733; note = Sequence Name: 56322-704_101_SL_seq_12192
cctgctgctgcccgtgctgg

SEQ ID NO: 12193 - DNA, 20 bp, Homo sapiens
  source 1..20: mol_type = genomic DNA; note = Gene: SIGLEC16; note = Location (start to end; relative to TSS): SIGLEC16_76_106; note = Orientation (relative to transcription): sense; note = sgRNA Position: 49969766; note = Sequence Name: 56322-704_101_SL_seq_12193
ggtcggtggctgggggtccc

SEQ ID NO: 12194 - DNA, 20 bp, Homo sapiens
  source 1..20: mol_type = genomic DNA; note = Gene: SIGLEC16; note = Location (start to end; relative to TSS): SIGLEC16_31_61; note = Orientation (relative to transcription): antisense; note = sgRNA Position: 49969701; note = Sequence Name: 56322-704_101_SL_seq_12194
ggggcagcagcagcatctct

SEQ ID NO: 12195 - DNA, 20 bp, Homo sapiens
  source 1..20: mol_type = genomic DNA; note = Gene: SIGLEC16; note = Location (start to end; relative to TSS): SIGLEC16_62_92; note = Orientation (relative to transcription): antisense; note = sgRNA Position: 49969732; note = Sequence Name: 56322-704_101_SL_seq_12195
cactcacccgcccccagcac

SEQ ID NO: 12196 - DNA, 20 bp, Homo sapiens
  source 1..20: mol_type = genomic DNA; note = Gene: SIGLEC16; note = Location (start to end; relative to TSS): SIGLEC16_24_54; note = Orientation (relative to transcription): antisense; note = sgRNA Position: 49969694; note = Sequence Name: 56322-704_101_SL_seq_12196
cagcagcatctctgggctct

SEQ ID NO: 12197 - DNA, 20 bp, Homo sapiens
  source 1..20: mol_type = genomic DNA; note = Gene: SIGLEC16; note = Location (start to end; relative to TSS): SIGLEC16_55_85; note = Orientation (relative to transcription): sense; note = sgRNA Position: 49969745; note = Sequence Name: 56322-704_101_SL_seq_12197
cgtgctgggggcgggtgagt

SEQ ID NO: 12198 - DNA, 20 bp, Homo sapiens
  source 1..20: mol_type = genomic DNA; note = Gene: SIGLEC16; note = Location (start to end; relative to TSS): SIGLEC16_23_53; note = Orientation (relative to transcription): antisense; note = sgRNA Position: 49969693; note = Sequence Name: 56322-704_101_SL_seq_12198
agcagcatctctgggctctg

SEQ ID NO: 12199 - DNA, 20 bp, Homo sapiens
  source 1..20: mol_type = genomic DNA; note = Gene: SIGLEC16; note = Location (start to end; relative to TSS): SIGLEC16_54_84; note = Orientation (relative to transcription): sense; note = sgRNA Position: 49969744; note = Sequence Name: 56322-704_101_SL_seq_12199
ccgtgctgggggcgggtgag

SEQ ID NO: 12200 - DNA, 20 bp, Homo sapiens
  source 1..20: mol_type = genomic DNA; note = Gene: SIGLEC17P; note = Location (start to end; relative to TSS): SIGLEC17P_28_58; note = Orientation (relative to transcription): sense; note = sgRNA Position: 51167452; note = Sequence Name: 56322-704_101_SL_seq_12200
tgggcaggtgagtggccctg

SEQ ID NO: 12201 - DNA, 20 bp, Homo sapiens
  source 1..20: mol_type = genomic DNA; note = Gene: SIGLEC17P; note = Location (start to end; relative to TSS): SIGLEC17P_76_106; note = Orientation (relative to transcription): sense; note = sgRNA Position: 51167500; note = Sequence Name: 56322-704_101_SL_seq_12201
ctgaccctcatgtctccaca

SEQ ID NO: 12202 - DNA, 20 bp, Homo sapiens
  source 1..20: mol_type = genomic DNA; note = Gene: SIGLEC17P; note = Location (start to end; relative to TSS): SIGLEC17P_29_59; note = Orientation (relative to transcription): antisense; note = sgRNA Position: 51167433; note = Sequence Name: 56322-704_101_SL_seq_12202
ccactcacctgcccacagca

SEQ ID NO: 12203 - DNA, 20 bp, Homo sapiens
  source 1..20: mol_type = genomic DNA; note = Gene: SIGLEC17P; note = Location (start to end; relative to TSS): SIGLEC17P_75_105; note = Orientation (relative to transcription): sense; note = sgRNA Position: 51167499; note = Sequence Name: 56322-704_101_SL_seq_12203
tctgaccctcatgtctccac

SEQ ID NO: 12204 - DNA, 20 bp, Homo sapiens
  source 1..20: mol_type = genomic DNA; note = Gene: SIGLEC17P; note = Location (start to end; relative to TSS): SIGLEC17P_30_60; note = Orientation (relative to transcription): antisense; note = sgRNA Position: 51167434; note = Sequence Name: 56322-704_101_SL_seq_12204
gccactcacctgcccacagc

SEQ ID NO: 12205 - DNA, 20 bp, Homo sapiens
  source 1..20: mol_type = genomic DNA; note = Gene: SIGLEC17P; note = Location (start to end; relative to TSS): SIGLEC17P_67_97; note = Orientation (relative to transcription): antisense; note = sgRNA Position: 51167471; note = Sequence Name: 56322-704_101_SL_seq_12205
gtcagatgggctcatcccca

SEQ ID NO: 12206 - DNA, 20 bp, Homo sapiens
  source 1..20: mol_type = genomic DNA; note = Gene: SIGLEC17P; note = Location (start to end; relative to TSS): SIGLEC17P_20_50; note = Orientation (relative to transcription): sense; note = sgRNA Position: 51167444; note = Sequence Name: 56322-704_101_SL_seq_12206
ccctgctgtgggcaggtgag

SEQ ID NO: 12207 - DNA, 20 bp, Homo sapiens
  source 1..20: mol_type = genomic DNA; note = Gene: SIGLEC17P; note = Location (start to end; relative to TSS): SIGLEC17P_53_83; note = Orientation (relative to transcription): antisense; note = sgRNA Position: 51167457; note = Sequence Name: 56322-704_101_SL_seq_12207
tccccacggcccctctcccc

SEQ ID NO: 12208 - DNA, 20 bp, Homo sapiens
  source 1..20: mol_type = genomic DNA; note = Gene: SIGLEC17P; note = Location (start to end; relative to TSS): SIGLEC17P_22_52; note = Orientation (relative to transcription): antisense; note = sgRNA Position: 51167426; note = Sequence Name: 56322-704_101_SL_seq_12208
cctgcccacagcaggggcag

SEQ ID NO: 12209 - DNA, 20 bp, Homo sapiens
  source 1..20: mol_type = genomic DNA; note = Gene: SIGLEC17P; note = Location (start to end; relative to TSS): SIGLEC17P_52_82; note = Orientation (relative to transcription): antisense; note = sgRNA Position: 51167456; note = Sequence Name: 56322-704_101_SL_seq_12209
ccccacggcccctctcccca

SEQ ID NO: 12210 - DNA, 20 bp, Homo sapiens
  source 1..20: mol_type = genomic DNA; note = Gene: SIGLEC18P; note = Location (start to end; relative to TSS): SIGLEC18P_45_75; note = Orientation (relative to transcription): sense; note = sgRNA Position: 51119871; note = Sequence Name: 56322-704_101_SL_seq_12210
ggctggtgctgctgccatcc

SEQ ID NO: 12211 - DNA, 20 bp, Homo sapiens
  source 1..20: mol_type = genomic DNA; note = Gene: SIGLEC18P; note = Location (start to end; relative to TSS): SIGLEC18P_93_123; note = Orientation (relative to transcription): sense; note = sgRNA Position: 51119919; note = Sequence Name: 56322-704_101_SL_seq_12211
ggggtcctgagcggggagcg

SEQ ID NO: 12212 - DNA, 20 bp, Homo sapiens
  source 1..20: mol_type = genomic DNA; note = Gene: SIGLEC18P; note = Location (start to end; relative to TSS): SIGLEC18P_28_58; note = Orientation (relative to transcription): sense; note = sgRNA Position: 51119854; note = Sequence Name: 56322-704_101_SL_seq_12212
aggcacagttctgctggggc

SEQ ID NO: 12213 - DNA, 20 bp, Homo sapiens
  source 1..20: mol_type = genomic DNA; note = Gene: SIGLEC18P; note = Location (start to end; relative to TSS): SIGLEC18P_92_122; note = Orientation (relative to transcription): sense; note = sgRNA Position: 51119918; note = Sequence Name: 56322-704_101_SL_seq_12213
aggggtcctgagcggggagc

SEQ ID NO: 12214 - DNA, 20 bp, Homo sapiens
  source 1..20: mol_type = genomic DNA; note = Gene: SIGLEC18P; note = Location (start to end; relative to TSS): SIGLEC18P_24_54; note = Orientation (relative to transcription): sense; note = sgRNA Position: 51119850; note = Sequence Name: 56322-704_101_SL_seq_12214
ctcaaggcacagttctgctg

SEQ ID NO: 12215 - DNA, 20 bp, Homo sapiens
  source 1..20: mol_type = genomic DNA; note = Gene: SIGLEC18P; note = Location (start to end; relative to TSS): SIGLEC18P_91_121; note = Orientation (relative to transcription): sense; note = sgRNA Position: 51119917; note = Sequence Name: 56322-704_101_SL_seq_12215
gaggggtcctgagcggggag

SEQ ID NO: 12216 - DNA, 20 bp, Homo sapiens
  source 1..20: mol_type = genomic DNA; note = Gene: SIGLEC18P; note = Location (start to end; relative to TSS): SIGLEC18P_23_53; note = Orientation (relative to transcription): sense; note = sgRNA Position: 51119849; note = Sequence Name: 56322-704_101_SL_seq_12216
gctcaaggcacagttctgct

SEQ ID NO: 12217 - DNA, 20 bp, Homo sapiens
  source 1..20: mol_type = genomic DNA; note = Gene: SIGLEC18P; note = Location (start to end; relative to TSS): SIGLEC18P_72_102; note = Orientation (relative to transcription): sense; note = sgRNA Position: 51119898; note = Sequence Name: 56322-704_101_SL_seq_12217
gagaaagtaagcagacccag

SEQ ID NO: 12218 - DNA, 20 bp, Homo sapiens
  source 1..20: mol_type = genomic DNA; note = Gene: SIGLEC18P; note = Location (start to end; relative to TSS): SIGLEC18P_19_49; note = Orientation (relative to transcription): antisense; note = sgRNA Position: 51119825; note = Sequence Name: 56322-704_101_SL_seq_12218
tgccttgagccatgagcacc

SEQ ID NO: 12219 - DNA, 20 bp, Homo sapiens
  source 1..20: mol_type = genomic DNA; note = Gene: SIGLEC18P; note = Location (start to end; relative to TSS): SIGLEC18P_68_98; note = Orientation (relative to transcription): antisense; note = sgRNA Position: 51119874; note = Sequence Name: 56322-704_101_SL_seq_12219
ttactttctcaccacctgga

SEQ ID NO: 12220 - DNA, 20 bp, Homo sapiens
  source 1..20: mol_type = genomic DNA; note = Gene: SIGLEC20P; note = Location (start to end; relative to TSS): SIGLEC20P_45_75; note = Orientation (relative to transcription): antisense; note = sgRNA Position: 51184796; note = Sequence Name: 56322-704_101_SL_seq_12220
gtctggggttgtaggtgcca

SEQ ID NO: 12221 - DNA, 20 bp, Homo sapiens
  source 1..20: mol_type = genomic DNA; note = Gene: SIGLEC20P; note = Location (start to end; relative to TSS): SIGLEC20P_76_106; note = Orientation (relative to transcription): sense; note = sgRNA Position: 51184847; note = Sequence Name: 56322-704_101_SL_seq_12221
cctgctctgggggagggagg

SEQ ID NO: 12222 - DNA, 20 bp, Homo sapiens
  source 1..20: mol_type = genomic DNA; note = Gene: SIGLEC20P; note = Location (start to end; relative to TSS): SIGLEC20P_37_67; note = Orientation (relative to transcription): antisense; note = sgRNA Position: 51184788; note = Sequence Name: 56322-704_101_SL_seq_12222
ttgtaggtgccagggctgcc

SEQ ID NO: 12223 - DNA, 20 bp, Homo sapiens
  source 1..20: mol_type = genomic DNA; note = Gene: SIGLEC20P; note = Location (start to end; relative to TSS): SIGLEC20P_69_99; note = Orientation (relative to transcription): sense; note = sgRNA Position: 51184840; note = Sequence Name: 56322-704_101_SL_seq_12223
tgctgcccctgctctggggg

SEQ ID NO: 12224 - DNA, 20 bp, Homo sapiens
  source 1..20: mol_type = genomic DNA; note = Gene: SIGLEC20P; note = Location (start to end; relative to TSS): SIGLEC20P_36_66; note = Orientation (relative to transcription): antisense; note = sgRNA Position: 51184787; note = Sequence Name: 56322-704_101_SL_seq_12224
tgtaggtgccagggctgcca

SEQ ID NO: 12225 - DNA, 20 bp, Homo sapiens
  source 1..20: mol_type = genomic DNA; note = Gene: SIGLEC20P; note = Location (start to end; relative to TSS): SIGLEC20P_66_96; note = Orientation (relative to transcription): sense; note = sgRNA Position: 51184837; note = Sequence Name: 56322-704_101_SL_seq_12225
tgctgctgcccctgctctgg

SEQ ID NO: 12226 - DNA, 20 bp, Homo sapiens
  source 1..20: mol_type = genomic DNA; note = Gene: SIGLEC20P; note = Location (start to end; relative to TSS): SIGLEC20P_18_48; note = Orientation (relative to transcription): antisense; note = sgRNA Position: 51184769; note = Sequence Name: 56322-704_101_SL_seq_12226
cagggaacgtctgttcctca

SEQ ID NO: 12227 - DNA, 20 bp, Homo sapiens
  source 1..20: mol_type = genomic DNA; note = Gene: SIGLEC20P; note = Location (start to end; relative to TSS): SIGLEC20P_60_90; note = Orientation (relative to transcription): antisense; note = sgRNA Position: 51184811; note = Sequence Name: 56322-704_101_SL_seq_12227
cagcagcagcagcatgtctg

SEQ ID NO: 12228 - DNA, 20 bp, Homo sapiens
  source 1..20: mol_type = genomic DNA; note = Gene: SIGLEC20P; note = Location (start to end; relative to TSS): SIGLEC20P_19_49; note = Orientation (relative to transcription): sense; note = sgRNA Position: 51184790; note = Sequence Name: 56322-704_101_SL_seq_12228
cagacgttccctggcagccc

SEQ ID NO: 12229 - DNA, 20 bp, Homo sapiens
  source 1..20: mol_type = genomic DNA; note = Gene: SIGLEC20P; note = Location (start to end; relative to TSS): SIGLEC20P_53_83; note = Orientation (relative to transcription): antisense; note = sgRNA Position: 51184804; note = Sequence Name: 56322-704_101_SL_seq_12229
agcagcatgtctggggttgt

SEQ ID NO: 12230 - DNA, 20 bp, Homo sapiens
  source 1..20: mol_type = genomic DNA; note = Gene: SIGLEC21P; note = Location (start to end; relative to TSS): SIGLEC21P_48_78; note = Orientation (relative to transcription): sense; note = sgRNA Position: 51198929; note = Sequence Name: 56322-704_101_SL_seq_12230
cactgaccttcattctccac

SEQ ID NO: 12231 - DNA, 20 bp, Homo sapiens
  source 1..20: mol_type = genomic DNA; note = Gene: SIGLEC21P; note = Location (start to end; relative to TSS): SIGLEC21P_117_147; note = Orientation (relative to transcription): antisense; note = sgRNA Position: 51198978; note = Sequence Name: 56322-704_101_SL_seq_12231
gcacaaagacgcatgggctc

SEQ ID NO: 12232 - DNA, 20 bp, Homo sapiens
  source 1..20: mol_type = genomic DNA; note = Gene: SIGLEC21P; note = Location (start to end; relative to TSS): SIGLEC21P_49_79; note = Orientation (relative to transcription): sense; note = sgRNA Position: 51198930; note = Sequence Name: 56322-704_101_SL_seq_12232
actgaccttcattctccaca

SEQ ID NO: 12233 - DNA, 20 bp, Homo sapiens
  source 1..20: mol_type = genomic DNA; note = Gene: SIGLEC21P; note = Location (start to end; relative to TSS): SIGLEC21P_80_110; note = Orientation (relative to transcription): sense; note = sgRNA Position: 51198961; note = Sequence Name: 56322-704_101_SL_seq_12233
tcaggaggcaatattctggc

SEQ ID NO: 12234 - DNA, 20 bp, Homo sapiens
  source 1..20: mol_type = genomic DNA; note = Gene: SIGLEC21P; note = Location (start to end; relative to TSS): SIGLEC21P_50_80; note = Orientation (relative to transcription): sense; note = sgRNA Position: 51198931; note = Sequence Name: 56322-704_101_SL_seq_12234
ctgaccttcattctccacag

SEQ ID NO: 12235 - DNA, 20 bp, Homo sapiens
  source 1..20: mol_type = genomic DNA; note = Gene: SIGLEC21P; note = Location (start to end; relative to TSS): SIGLEC21P_80_110; note = Orientation (relative to transcription): sense; note = sgRNA Position: 51198961; note = Sequence Name: 56322-704_101_SL_seq_12235
tcaggaggcaatattctggc

SEQ ID NO: 12236 - DNA, 20 bp, Homo sapiens
  source 1..20: mol_type = genomic DNA; note = Gene: SIGLEC21P; note = Location (start to end; relative to TSS): SIGLEC21P_40_70; note = Orientation (relative to transcription): antisense; note = sgRNA Position: 51198901; note = Sequence Name: 56322-704_101_SL_seq_12236
tcagtgaagtccagctcccc

SEQ ID NO: 12237 - DNA, 20 bp, Homo sapiens
  source 1..20: mol_type = genomic DNA; note = Gene: SIGLEC21P; note = Location (start to end; relative to TSS): SIGLEC21P_73_103; note = Orientation (relative to transcription): antisense; note = sgRNA Position: 51198934; note = Sequence Name: 56322-704_101_SL_seq_12237
ctcctgaaccatgtcccctg

SEQ ID NO: 12238 - DNA, 20 bp, Homo sapiens
  source 1..20: mol_type = genomic DNA; note = Gene: SIGLEC21P; note = Location (start to end; relative to TSS): SIGLEC21P_15_45; note = Orientation (relative to transcription): sense; note = sgRNA Position: 51198896; note = Sequence Name: 56322-704_101_SL_seq_12238
gcagtggggagaggggccgg

SEQ ID NO: 12239 - DNA, 20 bp, Homo sapiens
  source 1..20: mol_type = genomic DNA; note = Gene: SIGLEC21P; note = Location (start to end; relative to TSS): SIGLEC21P_48_78; note = Orientation (relative to transcription): sense; note = sgRNA Position: 51198929; note = Sequence Name: 56322-704_101_SL_seq_12239
cactgaccttcattctccac

SEQ ID NO: 12240 - DNA, 20 bp, Homo sapiens
  source 1..20: mol_type = genomic DNA; note = Gene: SIGLEC22P; note = Location (start to end; relative to TSS): SIGLEC22P_46_76; note = Orientation (relative to transcription): sense; note = sgRNA Position: 51211148; note = Sequence Name: 56322-704_101_SL_seq_12240
ccctgctgtgggcaggtgaa

SEQ ID NO: 12241 - DNA, 20 bp, Homo sapiens
  source 1..20: mol_type = genomic DNA; note = Gene: SIGLEC22P; note = Location (start to end; relative to TSS): SIGLEC22P_101_131; note = Orientation (relative to transcription): sense; note = sgRNA Position: 51211203; note = Sequence Name: 56322-704_101_SL_seq_12241
gctgaccctcgtttccccac

SEQ ID NO: 12242 - DNA, 20 bp, Homo sapiens
  source 1..20: mol_type = genomic DNA; note = Gene: SIGLEC22P; note = Location (start to end; relative to TSS): SIGLEC22P_39_69; note = Orientation (relative to transcription): sense; note = sgRNA Position: 51211141; note = Sequence Name: 56322-704_101_SL_seq_12242
ctgctgcccctgctgtgggc

SEQ ID NO: 12243 - DNA, 20 bp, Homo sapiens
  source 1..20: mol_type = genomic DNA; note = Gene: SIGLEC22P; note = Location (start to end; relative to TSS): SIGLEC22P_74_104; note = Orientation (relative to transcription): sense; note = sgRNA Position: 51211176; note = Sequence Name: 56322-704_101_SL_seq_12243
gggagaggggttgtcgggct

SEQ ID NO: 12244 - DNA, 20 bp, Homo sapiens
  source 1..20: mol_type = genomic DNA; note = Gene: SIGLEC22P; note = Location (start to end; relative to TSS): SIGLEC22P_35_65; note = Orientation (relative to transcription): sense; note = sgRNA Position: 51211137; note = Sequence Name: 56322-704_101_SL_seq_12244
gctactgctgcccctgctgt

SEQ ID NO: 12245 - DNA, 20 bp, Homo sapiens
  source 1..20: mol_type = genomic DNA; note = Gene: SIGLEC22P; note = Location (start to end; relative to TSS): SIGLEC22P_69_99; note = Orientation (relative to transcription): sense; note = sgRNA Position: 51211171; note = Sequence Name: 56322-704_101_SL_seq_12245
ctgcggggagaggggttgtc

SEQ ID NO: 12246 - DNA, 20 bp, Homo sapiens
  source 1..20: mol_type = genomic DNA; note = Gene: SIGLEC22P; note = Location (start to end; relative to TSS): SIGLEC22P_36_66; note = Orientation (relative to transcription): antisense; note = sgRNA Position: 51211118; note = Sequence Name: 56322-704_101_SL_seq_12246
aggggcagcagtagcagcag

SEQ ID NO: 12247 - DNA, 20 bp, Homo sapiens
  source 1..20: mol_type = genomic DNA; note = Gene: SIGLEC22P; note = Location (start to end; relative to TSS): SIGLEC22P_68_98; note = Orientation (relative to transcription): sense; note = sgRNA Position: 51211170; note = Sequence Name: 56322-704_101_SL_seq_12247
gctgcggggagaggggttgt

SEQ ID NO: 12248 - DNA, 20 bp, Homo sapiens
  source 1..20: mol_type = genomic DNA; note = Gene: SIGLEC22P; note = Location (start to end; relative to TSS): SIGLEC22P_19_49; note = Orientation (relative to transcription): antisense; note = sgRNA Position: 51211101; note = Sequence Name: 56322-704_101_SL_seq_12248
cagtggcatgtctgaggcag

SEQ ID NO: 12249 - DNA, 20 bp, Homo sapiens
  source 1..20: mol_type = genomic DNA; note = Gene: SIGLEC22P; note = Location (start to end; relative to TSS): SIGLEC22P_52_82; note = Orientation (relative to transcription): sense; note = sgRNA Position: 51211154; note = Sequence Name: 56322-704_101_SL_seq_12249
tgtgggcaggtgaatggctg

SEQ ID NO: 12250 - DNA, 20 bp, Homo sapiens
  source 1..20: mol_type = genomic DNA; note = Gene: SIGLEC24P; note = Location (start to end; relative to TSS): SIGLEC24P_38_68; note = Orientation (relative to transcription): antisense; note = sgRNA Position: 51280878; note = Sequence Name: 56322-704_101_SL_seq_12250
gtgcacagcccctcttccac

SEQ ID NO: 12251 - DNA, 20 bp, Homo sapiens
  source 1..20: mol_type = genomic DNA; note = Gene: SIGLEC24P; note = Location (start to end; relative to TSS): SIGLEC24P_97_127; note = Orientation (relative to transcription): antisense; note = sgRNA Position: 51280937; note = Sequence Name: 56322-704_101_SL_seq_12251
gcatgatcatggaattgctt

SEQ ID NO: 12252 - DNA, 20 bp, Homo sapiens
  source 1..20: mol_type = genomic DNA; note = Gene: SIGLEC24P; note = Location (start to end; relative to TSS): SIGLEC24P_21_51; note = Orientation (relative to transcription): sense; note = sgRNA Position: 51280881; note = Sequence Name: 56322-704_101_SL_seq_12252
agaagataccagtggaagag

SEQ ID NO: 12253 - DNA, 20 bp, Homo sapiens
  source 1..20: mol_type = genomic DNA; note = Gene: SIGLEC24P; note = Location (start to end; relative to TSS): SIGLEC24P_96_126; note = Orientation (relative to transcription): antisense; note = sgRNA Position: 51280936; note = Sequence Name: 56322-704_101_SL_seq_12253
catgatcatggaattgcttg

SEQ ID NO: 12254 - DNA, 20 bp, Homo sapiens
  source 1..20: mol_type = genomic DNA; note = Gene: SIGLEC24P; note = Location (start to end; relative to TSS): SIGLEC24P_20_50; note = Orientation (relative to transcription): sense; note = sgRNA Position: 51280880; note = Sequence Name: 56322-704_101_SL_seq_12254
aagaagataccagtggaaga

SEQ ID NO: 12255 - DNA, 20 bp, Homo sapiens
  source 1..20: mol_type = genomic DNA; note = Gene: SIGLEC24P; note = Location (start to end; relative to TSS): SIGLEC24P_95_125; note = Orientation (relative to transcription): antisense; note = sgRNA Position: 51280935; note = Sequence Name: 56322-704_101_SL_seq_12255
atgatcatggaattgcttgg

SEQ ID NO: 12256 - DNA, 20 bp, Homo sapiens
  source 1..20: mol_type = genomic DNA; note = Gene: SIGLEC24P; note = Location (start to end; relative to TSS): SIGLEC24P_19_49; note = Orientation (relative to transcription): sense; note = sgRNA Position: 51280879; note = Sequence Name: 56322-704_101_SL_seq_12256
caagaagataccagtggaag

SEQ ID NO: 12257 - DNA, 20 bp, Homo sapiens
  source 1..20: mol_type = genomic DNA; note = Gene: SIGLEC24P; note = Location (start to end; relative to TSS): SIGLEC24P_68_98; note = Orientation (relative to transcription): antisense; note = sgRNA Position: 51280908; note = Sequence Name: 56322-704_101_SL_seq_12257
ttgggaaattcaaatgcaca

SEQ ID NO: 12258 - DNA, 20 bp, Homo sapiens
  source 1..20: mol_type = genomic DNA; note = Gene: SIGLEC24P; note = Location (start to end; relative to TSS): SIGLEC24P_13_43; note = Orientation (relative to transcription): sense; note = sgRNA Position: 51280873; note = Sequence Name: 56322-704_101_SL_seq_12258
ggaagtcaagaagataccag

SEQ ID NO: 12259 - DNA, 20 bp, Homo sapiens
  source 1..20: mol_type = genomic DNA; note = Gene: SIGLEC24P; note = Location (start to end; relative to TSS): SIGLEC24P_67_97; note = Orientation (relative to transcription): antisense; note = sgRNA Position: 51280907; note = Sequence Name: 56322-704_101_SL_seq_12259
tgggaaattcaaatgcacaa

SEQ ID NO: 12260 - DNA, 20 bp, Homo sapiens
  source 1..20: mol_type = genomic DNA; note = Gene: SIGLEC25P; note = Location (start to end; relative to TSS): SIGLEC25P_46_76; note = Orientation (relative to transcription): sense; note = sgRNA Position: 51461733; note = Sequence Name: 56322-704_101_SL_seq_12260
gggagaggaaccatggggct

SEQ ID NO: 12261 - DNA, 20 bp, Homo sapiens
  source 1..20: mol_type = genomic DNA; note = Gene: SIGLEC25P; note = Location (start to end; relative to TSS): SIGLEC25P_81_111; note = Orientation (relative to transcription): sense; note = sgRNA Position: 51461698; note = Sequence Name: 56322-704_101_SL_seq_12261
tcatttccccacaggggatc

SEQ ID NO: 12262 - DNA, 20 bp, Homo sapiens
  source 1..20: mol_type = genomic DNA; note = Gene: SIGLEC25P; note = Location (start to end; relative to TSS): SIGLEC25P_45_75; note = Orientation (relative to transcription): sense; note = sgRNA Position: 51461734; note = Sequence Name: 56322-704_101_SL_seq_12262
agggagaggaaccatggggc

SEQ ID NO: 12263 - DNA, 20 bp, Homo sapiens
  source 1..20: mol_type = genomic DNA; note = Gene: SIGLEC25P; note = Location (start to end; relative to TSS): SIGLEC25P_75_105; note = Orientation (relative to transcription): sense; note = sgRNA Position: 51461704; note = Sequence Name: 56322-704_101_SL_seq_12263
tgaccctcatttccccacag

SEQ ID NO: 12264 - DNA, 20 bp, Homo sapiens
  source 1..20: mol_type = genomic DNA; note = Gene: SIGLEC25P; note = Location (start to end; relative to TSS): SIGLEC25P_26_56; note = Orientation (relative to transcription): antisense; note = sgRNA Position: 51461773; note = Sequence Name: 56322-704_101_SL_seq_12264
ccattctcctgcccacagca

SEQ ID NO: 12265 - DNA, 20 bp, Homo sapiens
  source 1..20: mol_type = genomic DNA; note = Gene: SIGLEC25P; note = Location (start to end; relative to TSS): SIGLEC25P_73_103; note = Orientation (relative to transcription): sense; note = sgRNA Position: 51461706; note = Sequence Name: 56322-704_101_SL_seq_12265
gctgaccctcatttccccac

SEQ ID NO: 12266 - DNA, 20 bp, Homo sapiens
  source 1..20: mol_type = genomic DNA; note = Gene: SIGLEC25P; note = Location (start to end; relative to TSS): SIGLEC25P_25_55; note = Orientation (relative to transcription): antisense; note = sgRNA Position: 51461774; note = Sequence Name: 56322-704_101_SL_seq_12266
cattctcctgcccacagcag

SEQ ID NO: 12267 - DNA, 20 bp, Homo sapiens
  source 1..20: mol_type = genomic DNA; note = Gene: SIGLEC25P; note = Location (start to end; relative to TSS): SIGLEC25P_65_95; note = Orientation (relative to transcription): antisense; note = sgRNA Position: 51461734; note = Sequence Name: 56322-704_101_SL_seq_12267
gtcagcccagcccagcccca

SEQ ID NO: 12268 - DNA, 20 bp, Homo sapiens
  source 1..20: mol_type = genomic DNA; note = Gene: SIGLEC25P; note = Location (start to end; relative to TSS): SIGLEC25P_18_48; note = Orientation (relative to transcription): sense; note = sgRNA Position: 51461761; note = Sequence Name: 56322-704_101_SL_seq_12268
cctgctgtgggcaggagaat

SEQ ID NO: 12269 - DNA, 20 bp, Homo sapiens
  source 1..20: mol_type = genomic DNA; note = Gene: SIGLEC25P; note = Location (start to end; relative to TSS): SIGLEC25P_50_80; note = Orientation (relative to transcription): antisense; note = sgRNA Position: 51461749; note = Sequence Name: 56322-704_101_SL_seq_12269
ccccatggttcctctccctg

SEQ ID NO: 12270 - DNA, 20 bp, Homo sapiens
  source 1..20: mol_type = genomic DNA; note = Gene: SIGLEC26P; note = Location (start to end; relative to TSS): SIGLEC26P_46_76; note = Orientation (relative to transcription): sense; note = sgRNA Position: 51469460; note = Sequence Name: 56322-704_101_SL_seq_12270
gatgagctctgaccacgtgt

SEQ ID NO: 12271 - DNA, 20 bp, Homo sapiens
  source 1..20: mol_type = genomic DNA; note = Gene: SIGLEC26P; note = Location (start to end; relative to TSS): SIGLEC26P_105_135; note = Orientation (relative to transcription): sense; note = sgRNA Position: 51469401; note = Sequence Name: 56322-704_101_SL_seq_12271
tgcttctcctcagcctccaa

SEQ ID NO: 12272 - DNA, 20 bp, Homo sapiens
  source 1..20: mol_type = genomic DNA; note = Gene: SIGLEC26P; note = Location (start to end; relative to TSS): SIGLEC26P_53_83; note = Orientation (relative to transcription): sense; note = sgRNA Position: 51469453; note = Sequence Name: 56322-704_101_SL_seq_12272
tctgaccacgtgtaggtctg

SEQ ID NO: 12273 - DNA, 20 bp, Homo sapiens
  source 1..20: mol_type = genomic DNA; note = Gene: SIGLEC26P; note = Location (start to end; relative to TSS): SIGLEC26P_103_133; note = Orientation (relative to transcription): antisense; note = sgRNA Position: 51469423; note = Sequence Name: 56322-704_101_SL_seq_12273
tgaggagaagcaggaggact

SEQ ID NO: 12274 - DNA, 20 bp, Homo sapiens
  source 1..20: mol_type = genomic DNA; note = Gene: SIGLEC26P; note = Location (start to end; relative to TSS): SIGLEC26P_67_97; note = Orientation (relative to transcription): antisense; note = sgRNA Position: 51469459; note = Sequence Name: 56322-704_101_SL_seq_12274
aaaaacctcagacctacacg

SEQ ID NO: 12275 - DNA, 20 bp, Homo sapiens
  source 1..20: mol_type = genomic DNA; note = Gene: SIGLEC26P; note = Location (start to end; relative to TSS): SIGLEC26P_100_130; note = Orientation (relative to transcription): antisense; note = sgRNA Position: 51469426; note = Sequence Name: 56322-704_101_SL_seq_12275
ggagaagcaggaggacttgg

SEQ ID NO: 12276 - DNA, 20 bp, Homo sapiens
  source 1..20: mol_type = genomic DNA; note = Gene: SIGLEC26P; note = Location (start to end; relative to TSS): SIGLEC26P_22_52; note = Orientation (relative to transcription): sense; note = sgRNA Position: 51469484; note = Sequence Name: 56322-704_101_SL_seq_12276
tctccctctgctctgtgcag

SEQ ID NO: 12277 - DNA, 20 bp, Homo sapiens
  source 1..20: mol_type = genomic DNA; note = Gene: SIGLEC26P; note = Location (start to end; relative to TSS): SIGLEC26P_53_83; note = Orientation (relative to transcription): sense; note = sgRNA Position: 51469453; note = Sequence Name: 56322-704_101_SL_seq_12277
tctgaccacgtgtaggtctg

SEQ ID NO: 12278 - DNA, 20 bp, Homo sapiens
  source 1..20: mol_type = genomic DNA; note = Gene: SIGLEC26P; note = Location (start to end; relative to TSS): SIGLEC26P_-3_27; note = Orientation (relative to transcription): sense; note = sgRNA Position: 51469509; note = Sequence Name: 56322-704_101_SL_seq_12278
ctcccctctggggaggtctc

SEQ ID NO: 12279 - DNA, 20 bp, Homo sapiens
  source 1..20: mol_type = genomic DNA; note = Gene: SIGLEC26P; note = Location (start to end; relative to TSS): SIGLEC26P_46_76; note = Orientation (relative to transcription): sense; note = sgRNA Position: 51469460; note = Sequence Name: 56322-704_101_SL_seq_12279
gatgagctctgaccacgtgt

SEQ ID NO: 12280 - DNA, 20 bp, Homo sapiens
  source 1..20: mol_type = genomic DNA; note = Gene: SIGLEC27P; note = Location (start to end; relative to TSS): SIGLEC27P_48_78; note = Orientation (relative to transcription): sense; note = sgRNA Position: 51508476; note = Sequence Name: 56322-704_101_SL_seq_12280
ggaccagctcagcaaacccg

SEQ ID NO: 12281 - DNA, 20 bp, Homo sapiens
  source 1..20: mol_type = genomic DNA; note = Gene: SIGLEC27P; note = Location (start to end; relative to TSS): SIGLEC27P_89_119; note = Orientation (relative to transcription): antisense; note = sgRNA Position: 51508497; note = Sequence Name: 56322-704_101_SL_seq_12281
cttgtcctctgggtctcctg

SEQ ID NO: 12282 - DNA, 20 bp, Homo sapiens
  source 1..20: mol_type = genomic DNA; note = Gene: SIGLEC27P; note = Location (start to end; relative to TSS): SIGLEC27P_27_57; note = Orientation (relative to transcription): sense; note = sgRNA Position: 51508455; note = Sequence Name: 56322-704_101_SL_seq_12282
tccctggagggggctctgga

SEQ ID NO: 12283 - DNA, 20 bp, Homo sapiens
  source 1..20: mol_type = genomic DNA; note = Gene: SIGLEC27P; note = Location (start to end; relative to TSS): SIGLEC27P_73_103; note = Orientation (relative to transcription): antisense; note = sgRNA Position: 51508481; note = Sequence Name: 56322-704_101_SL_seq_12283
cctgggggctgcctggcctc

SEQ ID NO: 12284 - DNA, 20 bp, Homo sapiens
  source 1..20: mol_type = genomic DNA; note = Gene: SIGLEC27P; note = Location (start to end; relative to TSS): SIGLEC27P_25_55; note = Orientation (relative to transcription): antisense; note = sgRNA Position: 51508433; note = Sequence Name: 56322-704_101_SL_seq_12284
cccctccagggaagagaaga

SEQ ID NO: 12285 - DNA, 20 bp, Homo sapiens
  source 1..20: mol_type = genomic DNA; note = Gene: SIGLEC27P; note = Location (start to end; relative to TSS): SIGLEC27P_64_94; note = Orientation (relative to transcription): sense; note = sgRNA Position: 51508492; note = Sequence Name: 56322-704_101_SL_seq_12285
cccgaggccaggcagccccc

SEQ ID NO: 12286 - DNA, 20 bp, Homo sapiens
  source 1..20: mol_type = genomic DNA; note = Gene: SIGLEC27P; note = Location (start to end; relative to TSS): SIGLEC27P_26_56; note = Orientation (relative to transcription): antisense; note = sgRNA Position: 51508434; note = Sequence Name: 56322-704_101_SL_seq_12286
ccccctccagggaagagaag

SEQ ID NO: 12287 - DNA, 20 bp, Homo sapiens
  source 1..20: mol_type = genomic DNA; note = Gene: SIGLEC27P; note = Location (start to end; relative to TSS): SIGLEC27P_60_90; note = Orientation (relative to transcription): antisense; note = sgRNA Position: 51508468; note = Sequence Name: 56322-704_101_SL_seq_12287
tggcctcgggtttgctgagc

SEQ ID NO: 12288 - DNA, 20 bp, Homo sapiens
  source 1..20: mol_type = genomic DNA; note = Gene: SIGLEC27P; note = Location (start to end; relative to TSS): SIGLEC27P_17_47; note = Orientation (relative to transcription): sense; note = sgRNA Position: 51508445; note = Sequence Name: 56322-704_101_SL_seq_12288
cctcttctcttccctggagg

SEQ ID NO: 12289 - DNA, 20 bp, Homo sapiens
  source 1..20: mol_type = genomic DNA; note = Gene: SIGLEC27P; note = Location (start to end; relative to TSS): SIGLEC27P_48_78; note = Orientation (relative to transcription): sense; note = sgRNA Position: 51508476; note = Sequence Name: 56322-704_101_SL_seq_12289
ggaccagctcagcaaacccg

SEQ ID NO: 12290 - DNA, 20 bp, Homo sapiens
  source 1..20: mol_type = genomic DNA; note = Gene: SIGLEC28P; note = Location (start to end; relative to TSS): SIGLEC28P_43_73; note = Orientation (relative to transcription): antisense; note = sgRNA Position: 51546040; note = Sequence Name: 56322-704_101_SL_seq_12290
ctctggagcctcctgagtgg

SEQ ID NO: 12291 - DNA, 20 bp, Homo sapiens
  source 1..20: mol_type = genomic DNA; note = Gene: SIGLEC28P; note = Location (start to end; relative to TSS): SIGLEC28P_84_114; note = Orientation (relative to transcription): antisense; note = sgRNA Position: 51545999; note = Sequence Name: 56322-704_101_SL_seq_12291
aagccaggagccctggagtg

SEQ ID NO: 12292 - DNA, 20 bp, Homo sapiens
  source 1..20: mol_type = genomic DNA; note = Gene: SIGLEC28P; note = Location (start to end; relative to TSS): SIGLEC28P_44_74; note = Orientation (relative to transcription): antisense; note = sgRNA Position: 51546039; note = Sequence Name: 56322-704_101_SL_seq_12292
gctctggagcctcctgagtg

SEQ ID NO: 12293 - DNA, 20 bp, Homo sapiens
  source 1..20: mol_type = genomic DNA; note = Gene: SIGLEC28P; note = Location (start to end; relative to TSS): SIGLEC28P_78_108; note = Orientation (relative to transcription): sense; note = sgRNA Position: 51545985; note = Sequence Name: 56322-704_101_SL_seq_12293
cactccagggctcctggctt

SEQ ID NO: 12294 - DNA, 20 bp, Homo sapiens
  source 1..20: mol_type = genomic DNA; note = Gene: SIGLEC28P; note = Location (start to end; relative to TSS): SIGLEC28P_18_48; note = Orientation (relative to transcription): antisense; note = sgRNA Position: 51546065; note = Sequence Name: 56322-704_101_SL_seq_12294
gctgtccccgcagcctatgc

SEQ ID NO: 12295 - DNA, 20 bp, Homo sapiens
  source 1..20: mol_type = genomic DNA; note = Gene: SIGLEC28P; note = Location (start to end; relative to TSS): SIGLEC28P_65_95; note = Orientation (relative to transcription): sense; note = sgRNA Position: 51545998; note = Sequence Name: 56322-704_101_SL_seq_12295
ttagtcttttcctcactcca

SEQ ID NO: 12296 - DNA, 20 bp, Homo sapiens
  source 1..20: mol_type = genomic DNA; note = Gene: SIGLEC28P; note = Location (start to end; relative to TSS): SIGLEC28P_23_53; note = Orientation (relative to transcription): sense; note = sgRNA Position: 51546040; note = Sequence Name: 56322-704_101_SL_seq_12296
ggggacagcagcccccactc

SEQ ID NO: 12297 - DNA, 20 bp, Homo sapiens
  source 1..20: mol_type = genomic DNA; note = Gene: SIGLEC28P; note = Location (start to end; relative to TSS): SIGLEC28P_64_94; note = Orientation (relative to transcription): sense; note = sgRNA Position: 51545999; note = Sequence Name: 56322-704_101_SL_seq_12297
cttagtcttttcctcactcc

SEQ ID NO: 12298 - DNA, 20 bp, Homo sapiens
  source 1..20: mol_type = genomic DNA; note = Gene: SIGLEC28P; note = Location (start to end; relative to TSS): SIGLEC28P_26_56; note = Orientation (relative to transcription): sense; note = sgRNA Position: 51546037; note = Sequence Name: 56322-704_101_SL_seq_12298
gacagcagcccccactcagg

SEQ ID NO: 12299 - DNA, 20 bp, Homo sapiens
  source 1..20: mol_type = genomic DNA; note = Gene: SIGLEC28P; note = Location (start to end; relative to TSS): SIGLEC28P_60_90; note = Orientation (relative to transcription): antisense; note = sgRNA Position: 51546023; note = Sequence Name: 56322-704_101_SL_seq_12299
aaagactaagccttgggctc

SEQ ID NO: 12300 - DNA, 20 bp, Homo sapiens
  source 1..20: mol_type = genomic DNA; note = Gene: SIGLEC29P; note = Location (start to end; relative to TSS): SIGLEC29P_18_48; note = Orientation (relative to transcription): sense; note = sgRNA Position: 51564874; note = Sequence Name: 56322-704_101_SL_seq_12300
cctgctgtggggaggtgagg

SEQ ID NO: 12301 - DNA, 20 bp, Homo sapiens
  source 1..20: mol_type = genomic DNA; note = Gene: SIGLEC29P; note = Location (start to end; relative to TSS): SIGLEC29P_86_116; note = Orientation (relative to transcription): sense; note = sgRNA Position: 51564806; note = Sequence Name: 56322-704_101_SL_seq_12301
aaatgctggaggaccacgcg

SEQ ID NO: 12302 - DNA, 20 bp, Homo sapiens
  source 1..20: mol_type = genomic DNA; note = Gene: SIGLEC29P; note = Location (start to end; relative to TSS): SIGLEC29P_23_53; note = Orientation (relative to transcription): sense; note = sgRNA Position: 51564869; note = Sequence Name: 56322-704_101_SL_seq_12302
tgtggggaggtgagggggct

SEQ ID NO: 12303 - DNA, 20 bp, Homo sapiens
  source 1..20: mol_type = genomic DNA; note = Gene: SIGLEC29P; note = Location (start to end; relative to TSS): SIGLEC29P_85_115; note = Orientation (relative to transcription): sense; note = sgRNA Position: 51564807; note = Sequence Name: 56322-704_101_SL_seq_12303
taaatgctggaggaccacgc

SEQ ID NO: 12304 - DNA, 20 bp, Homo sapiens
  source 1..20: mol_type = genomic DNA; note = Gene: SIGLEC29P; note = Location (start to end; relative to TSS): SIGLEC29P_26_56; note = Orientation (relative to transcription): antisense; note = sgRNA Position: 51564886; note = Sequence Name: 56322-704_101_SL_seq_12304
cccctcacctccccacagca

SEQ ID NO: 12305 - DNA, 20 bp, Homo sapiens
  source 1..20: mol_type = genomic DNA; note = Gene: SIGLEC29P; note = Location (start to end; relative to TSS): SIGLEC29P_84_114; note = Orientation (relative to transcription): sense; note = sgRNA Position: 51564808; note = Sequence Name: 56322-704_101_SL_seq_12305
ctaaatgctggaggaccacg

SEQ ID NO: 12306 - DNA, 20 bp, Homo sapiens
  source 1..20: mol_type = genomic DNA; note = Gene: SIGLEC29P; note = Location (start to end; relative to TSS): SIGLEC29P_27_57; note = Orientation (relative to transcription): antisense; note = sgRNA Position: 51564885; note = Sequence Name: 56322-704_101_SL_seq_12306
ccccctcacctccccacagc

SEQ ID NO: 12307 - DNA, 20 bp, Homo sapiens
  source 1..20: mol_type = genomic DNA; note = Gene: SIGLEC29P; note = Location (start to end; relative to TSS): SIGLEC29P_75_105; note = Orientation (relative to transcription): sense; note = sgRNA Position: 51564817; note = Sequence Name: 56322-704_101_SL_seq_12307
tgtcaaagcctaaatgctgg

SEQ ID NO: 12308 - DNA, 20 bp, Homo sapiens
  source 1..20: mol_type = genomic DNA; note = Gene: SIGLEC29P; note = Location (start to end; relative to TSS): SIGLEC29P_17_47; note = Orientation (relative to transcription): sense; note = sgRNA Position: 51564875; note = Sequence Name: 56322-704_101_SL_seq_12308
ccctgctgtggggaggtgag

SEQ ID NO: 12309 - DNA, 20 bp, Homo sapiens
  source 1..20: mol_type = genomic DNA; note = Gene: SIGLEC29P; note = Location (start to end; relative to TSS): SIGLEC29P_72_102; note = Orientation (relative to transcription): sense; note = sgRNA Position: 51564820; note = Sequence Name: 56322-704_101_SL_seq_12309
caatgtcaaagcctaaatgc

SEQ ID NO: 12310 - DNA, 20 bp, Homo sapiens
  source 1..20: mol_type = genomic DNA; note = Gene: SIGLEC30P; note = Location (start to end; relative to TSS): SIGLEC30P_56_86; note = Orientation (relative to transcription): sense; note = sgRNA Position: 170115663; note = Sequence Name: 56322-704_101_SL_seq_12310
tgctgtctttgctgctgggc

SEQ ID NO: 12311 - DNA, 20 bp, Homo sapiens
  source 1..20: mol_type = genomic DNA; note = Gene: SIGLEC30P; note = Location (start to end; relative to TSS): SIGLEC30P_117_147; note = Orientation (relative to transcription): sense; note = sgRNA Position: 170115724; note = Sequence Name: 56322-704_101_SL_seq_12311
agagtcagtgataacacagg

SEQ ID NO: 12312 - DNA, 20 bp, Homo sapiens
  source 1..20: mol_type = genomic DNA; note = Gene: SIGLEC30P; note = Location (start to end; relative to TSS): SIGLEC30P_49_79; note = Orientation (relative to transcription): antisense; note = sgRNA Position: 170115636; note = Sequence Name: 56322-704_101_SL_seq_12312
gacagcagcaacagcatagg

SEQ ID NO: 12313 - DNA, 20 bp, Homo sapiens
  source 1..20: mol_type = genomic DNA; note = Gene: SIGLEC30P; note = Location (start to end; relative to TSS): SIGLEC30P_114_144; note = Orientation (relative to transcription): sense; note = sgRNA Position: 170115721; note = Sequence Name: 56322-704_101_SL_seq_12313
gcaagagtcagtgataacac

SEQ ID NO: 12314 - DNA, 20 bp, Homo sapiens
  source 1..20: mol_type = genomic DNA; note = Gene: SIGLEC30P; note = Location (start to end; relative to TSS): SIGLEC30P_52_82; note = Orientation (relative to transcription): antisense; note = sgRNA Position: 170115639; note = Sequence Name: 56322-704_101_SL_seq_12314
aaagacagcagcaacagcat

SEQ ID NO: 12315 - DNA, 20 bp, Homo sapiens
  source 1..20: mol_type = genomic DNA; note = Gene: SIGLEC30P; note = Location (start to end; relative to TSS): SIGLEC30P_83_113; note = Orientation (relative to transcription): sense; note = sgRNA Position: 170115690; note = Sequence Name: 56322-704_101_SL_seq_12315
aggctctggatgggagattc

SEQ ID NO: 12316 - DNA, 20 bp, Homo sapiens
  source 1..20: mol_type = genomic DNA; note = Gene: SIGLEC30P; note = Location (start to end; relative to TSS): SIGLEC30P_26_56; note = Orientation (relative to transcription): antisense; note = sgRNA Position: 170115613; note = Sequence Name: 56322-704_101_SL_seq_12316
cacagcgacatgcctgagac

SEQ ID NO: 12317 - DNA, 20 bp, Homo sapiens
  source 1..20: mol_type = genomic DNA; note = Gene: SIGLEC30P; note = Location (start to end; relative to TSS): SIGLEC30P_56_86; note = Orientation (relative to transcription): sense; note = sgRNA Position: 170115663; note = Sequence Name: 56322-704_101_SL_seq_12317
tgctgtctttgctgctgggc

SEQ ID NO: 12318 - DNA, 20 bp, Homo sapiens
  source 1..20: mol_type = genomic DNA; note = Gene: SIGLEC30P; note = Location (start to end; relative to TSS): SIGLEC30P_14_44; note = Orientation (relative to transcription): antisense; note = sgRNA Position: 170115601; note = Sequence Name: 56322-704_101_SL_seq_12318
cctgagacaggcctattccc

SEQ ID NO: 12319 - DNA, 20 bp, Homo sapiens
  source 1..20: mol_type = genomic DNA; note = Gene: SIGLEC30P; note = Location (start to end; relative to TSS): SIGLEC30P_49_79; note = Orientation (relative to transcription): antisense; note = sgRNA Position: 170115636; note = Sequence Name: 56322-704_101_SL_seq_12319
gacagcagcaacagcatagg

SEQ ID NO: 12320 - DNA, 20 bp, Homo sapiens
  source 1..20: mol_type = genomic DNA; note = Gene: SIGLEC31P; note = Location (start to end; relative to TSS): SIGLEC31P_47_77; note = Orientation (relative to transcription): sense; note = sgRNA Position: 56590420; note = Sequence Name: 56322-704_101_SL_seq_12320
agtgtgagtgatcccaaggg

SEQ ID NO: 12321 - DNA, 20 bp, Homo sapiens
  source 1..20: mol_type = genomic DNA; note = Gene: SIGLEC31P; note = Location (start to end; relative to TSS): SIGLEC31P_105_135; note = Orientation (relative to transcription): antisense; note = sgRNA Position: 56590382; note = Sequence Name: 56322-704_101_SL_seq_12321
gttccaaaggaccaacaacc

SEQ ID NO: 12322 - DNA, 20 bp, Homo sapiens
  source 1..20: mol_type = genomic DNA; note = Gene: SIGLEC31P; note = Location (start to end; relative to TSS): SIGLEC31P_44_74; note = Orientation (relative to transcription): sense; note = sgRNA Position: 56590423; note = Sequence Name: 56322-704_101_SL_seq_12322
gggagtgtgagtgatcccaa

SEQ ID NO: 12323 - DNA, 20 bp, Homo sapiens
  source 1..20: mol_type = genomic DNA; note = Gene: SIGLEC31P; note = Location (start to end; relative to TSS): SIGLEC31P_104_134; note = Orientation (relative to transcription): antisense; note = sgRNA Position: 56590383; note = Sequence Name: 56322-704_101_SL_seq_12323
ttccaaaggaccaacaacct

SEQ ID NO: 12324 - DNA, 20 bp, Homo sapiens
  source 1..20: mol_type = genomic DNA; note = Gene: SIGLEC31P; note = Location (start to end; relative to TSS): SIGLEC31P_43_73; note = Orientation (relative to transcription): sense; note = sgRNA Position: 56590424; note = Sequence Name: 56322-704_101_SL_seq_12324
agggagtgtgagtgatccca

SEQ ID NO: 12325 - DNA, 20 bp, Homo sapiens
  source 1..20: mol_type = genomic DNA; note = Gene: SIGLEC31P; note = Location (start to end; relative to TSS): SIGLEC31P_103_133; note = Orientation (relative to transcription): antisense; note = sgRNA Position: 56590384; note = Sequence Name: 56322-704_101_SL_seq_12325
tccaaaggaccaacaacctg

SEQ ID NO: 12326 - DNA, 20 bp, Homo sapiens
  source 1..20: mol_type = genomic DNA; note = Gene: SIGLEC31P; note = Location (start to end; relative to TSS): SIGLEC31P_24_54; note = Orientation (relative to transcription): antisense; note = sgRNA Position: 56590463; note = Sequence Name: 56322-704_101_SL_seq_12326
cccacacacacataaagcag

SEQ ID NO: 12327 - DNA, 20 bp, Homo sapiens
  source 1..20: mol_type = genomic DNA; note = Gene: SIGLEC31P; note = Location (start to end; relative to TSS): SIGLEC31P_60_90; note = Orientation (relative to transcription): sense; note = sgRNA Position: 56590407; note = Sequence Name: 56322-704_101_SL_seq_12327
ccaagggaggttcagaaggg

SEQ ID NO: 12328 - DNA, 20 bp, Homo sapiens
  source 1..20: mol_type = genomic DNA; note = Gene: SIGLEC31P; note = Location (start to end; relative to TSS): SIGLEC31P_23_53; note = Orientation (relative to transcription): sense; note = sgRNA Position: 56590444; note = Sequence Name: 56322-704_101_SL_seq_12328
ttatgtgtgtgtggggatgc

SEQ ID NO: 12329 - DNA, 20 bp, Homo sapiens
  source 1..20: mol_type = genomic DNA; note = Gene: SIGLEC31P; note = Location (start to end; relative to TSS): SIGLEC31P_57_87; note = Orientation (relative to transcription): sense; note = sgRNA Position: 56590410; note = Sequence Name: 56322-704_101_SL_seq_12329
atcccaagggaggttcagaa

SEQ ID NO: 12330 - DNA, 20 bp, Homo sapiens
  source 1..20: mol_type = genomic DNA; note = Gene: SIGLEC5; note = Location (start to end; relative to TSS): SIGLEC5_27_57; note = Orientation (relative to transcription): antisense; note = sgRNA Position: 51630370; note = Sequence Name: 56322-704_101_SL_seq_12330
ccccagcccagtcccaggtc

SEQ ID NO: 12331 - DNA, 20 bp, Homo sapiens
  source 1..20: mol_type = genomic DNA; note = Gene: SIGLEC5; note = Location (start to end; relative to TSS): SIGLEC5_70_100; note = Orientation (relative to transcription): sense; note = sgRNA Position: 51630307; note = Sequence Name: 56322-704_101_SL_seq_12331
ctgctgctgcccctgctgtg

SEQ ID NO: 12332 - DNA, 20 bp, Homo sapiens
  source 1..20: mol_type = genomic DNA; note = Gene: SIGLEC5; note = Location (start to end; relative to TSS): SIGLEC5_32_62; note = Orientation (relative to transcription): antisense; note = sgRNA Position: 51630365; note = Sequence Name: 56322-704_101_SL_seq_12332
cagggccccagcccagtccc

SEQ ID NO: 12333 - DNA, 20 bp, Homo sapiens
  source 1..20: mol_type = genomic DNA; note = Gene: SIGLEC5; note = Location (start to end; relative to TSS): SIGLEC5_69_99; note = Orientation (relative to transcription): sense; note = sgRNA Position: 51630308; note = Sequence Name: 56322-704_101_SL_seq_12333
gctgctgctgcccctgctgt

SEQ ID NO: 12334 - DNA, 20 bp, Homo sapiens
  source 1..20: mol_type = genomic DNA; note = Gene: SIGLEC5; note = Location (start to end; relative to TSS): SIGLEC5_18_48; note = Orientation (relative to transcription): antisense; note = sgRNA Position: 51630379; note = Sequence Name: 56322-704_101_SL_seq_12334
agtcccaggtccggctgtca

SEQ ID NO: 12335 - DNA, 20 bp, Homo sapiens
  source 1..20: mol_type = genomic DNA; note = Gene: SIGLEC5; note = Location (start to end; relative to TSS): SIGLEC5_68_98; note = Orientation (relative to transcription): sense; note = sgRNA Position: 51630309; note = Sequence Name: 56322-704_101_SL_seq_12335
tgctgctgctgcccctgctg

SEQ ID NO: 12336 - DNA, 20 bp, Homo sapiens
  source 1..20: mol_type = genomic DNA; note = Gene: SIGLEC5; note = Location (start to end; relative to TSS): SIGLEC5_19_49; note = Orientation (relative to transcription): antisense; note = sgRNA Position: 51630378; note = Sequence Name: 56322-704_101_SL_seq_12336
cagtcccaggtccggctgtc

SEQ ID NO: 12337 - DNA, 20 bp, Homo sapiens
  source 1..20: mol_type = genomic DNA; note = Gene: SIGLEC5; note = Location (start to end; relative to TSS): SIGLEC5_51_81; note = Orientation (relative to transcription): antisense; note = sgRNA Position: 51630346; note = Sequence Name: 56322-704_101_SL_seq_12337
gcagcatgtctccatccgcc

SEQ ID NO: 12338 - DNA, 20 bp, Homo sapiens
  source 1..20: mol_type = genomic DNA; note = Gene: SIGLEC5; note = Location (start to end; relative to TSS): SIGLEC5_16_46; note = Orientation (relative to transcription): sense; note = sgRNA Position: 51630361; note = Sequence Name: 56322-704_101_SL_seq_12338
agccggacctgggactgggc

SEQ ID NO: 12339 - DNA, 20 bp, Homo sapiens
  source 1..20: mol_type = genomic DNA; note = Gene: SIGLEC5; note = Location (start to end; relative to TSS): SIGLEC5_50_80; note = Orientation (relative to transcription): antisense; note = sgRNA Position: 51630347; note = Sequence Name: 56322-704_101_SL_seq_12339
cagcatgtctccatccgcca

SEQ ID NO: 12340 - DNA, 20 bp, Homo sapiens
  source 1..20: mol_type = genomic DNA; note = Gene: SIGLEC6; note = Location (start to end; relative to TSS): SIGLEC6_48_78; note = Orientation (relative to transcription): antisense; note = sgRNA Position: 51531618; note = Sequence Name: 56322-704_101_SL_seq_12340
cagcagcggtagcatctctg

SEQ ID NO: 12341 - DNA, 20 bp, Homo sapiens
  source 1..20: mol_type = genomic DNA; note = Gene: SIGLEC6; note = Location (start to end; relative to TSS): SIGLEC6_94_124; note = Orientation (relative to transcription): sense; note = sgRNA Position: 51531552; note = Sequence Name: 56322-704_101_SL_seq_12341
gggagaggtgccgtggggct

SEQ ID NO: 12342 - DNA, 20 bp, Homo sapiens
  source 1..20: mol_type = genomic DNA; note = Gene: SIGLEC6; note = Location (start to end; relative to TSS): SIGLEC6_54_84; note = Orientation (relative to transcription): sense; note = sgRNA Position: 51531592; note = Sequence Name: 56322-704_101_SL_seq_12342
cgctgctgctgcccctgctg

SEQ ID NO: 12343 - DNA, 20 bp, Homo sapiens
  source 1..20: mol_type = genomic DNA; note = Gene: SIGLEC6; note = Location (start to end; relative to TSS): SIGLEC6_89_119; note = Orientation (relative to transcription): sense; note = sgRNA Position: 51531557; note = Sequence Name: 56322-704_101_SL_seq_12343
gccaggggagaggtgccgtg

SEQ ID NO: 12344 - DNA, 20 bp, Homo sapiens
  source 1..20: mol_type = genomic DNA; note = Gene: SIGLEC6; note = Location (start to end; relative to TSS): SIGLEC6_55_85; note = Orientation (relative to transcription): sense; note = sgRNA Position: 51531591; note = Sequence Name: 56322-704_101_SL_seq_12344
gctgctgctgcccctgctgt

SEQ ID NO: 12345 - DNA, 20 bp, Homo sapiens
  source 1..20: mol_type = genomic DNA; note = Gene: SIGLEC6; note = Location (start to end; relative to TSS): SIGLEC6_88_118; note = Orientation (relative to transcription): sense; note = sgRNA Position: 51531558; note = Sequence Name: 56322-704_101_SL_seq_12345
ggccaggggagaggtgccgt

SEQ ID NO: 12346 - DNA, 20 bp, Homo sapiens
  source 1..20: mol_type = genomic DNA; note = Gene: SIGLEC6; note = Location (start to end; relative to TSS): SIGLEC6_45_75; note = Orientation (relative to transcription): antisense; note = sgRNA Position: 51531621; note = Sequence Name: 56322-704_101_SL_seq_12346
cagcggtagcatctctgagg

SEQ ID NO: 12347 - DNA, 20 bp, Homo sapiens
  source 1..20: mol_type = genomic DNA; note = Gene: SIGLEC6; note = Location (start to end; relative to TSS): SIGLEC6_75_105; note = Orientation (relative to transcription): antisense; note = sgRNA Position: 51531591; note = Sequence Name: 56322-704_101_SL_seq_12347
ccactcacctgcccacagca

SEQ ID NO: 12348 - DNA, 20 bp, Homo sapiens
  source 1..20: mol_type = genomic DNA; note = Gene: SIGLEC6; note = Location (start to end; relative to TSS): SIGLEC6_42_72; note = Orientation (relative to transcription): antisense; note = sgRNA Position: 51531624; note = Sequence Name: 56322-704_101_SL_seq_12348
cggtagcatctctgaggcgg

SEQ ID NO: 12349 - DNA, 20 bp, Homo sapiens
  source 1..20: mol_type = genomic DNA; note = Gene: SIGLEC6; note = Location (start to end; relative to TSS): SIGLEC6_73_103; note = Orientation (relative to transcription): sense; note = sgRNA Position: 51531573; note = Sequence Name: 56322-704_101_SL_seq_12349
gtgggcaggtgagtgggcca

SEQ ID NO: 12350 - DNA, 20 bp, Homo sapiens
  source 1..20: mol_type = genomic DNA; note = Gene: SIGLEC7; note = Location (start to end; relative to TSS): SIGLEC7_46_76; note = Orientation (relative to transcription): antisense; note = sgRNA Position: 51142353; note = Sequence Name: 56322-704_101_SL_seq_12350
atctggggttggaggtgcca

SEQ ID NO: 12351 - DNA, 20 bp, Homo sapiens
  source 1..20: mol_type = genomic DNA; note = Gene: SIGLEC7; note = Location (start to end; relative to TSS): SIGLEC7_76_106; note = Orientation (relative to transcription): sense; note = sgRNA Position: 51142403; note = Sequence Name: 56322-704_101_SL_seq_12351
tgctgcccctgctctggggg

SEQ ID NO: 12352 - DNA, 20 bp, Homo sapiens
  source 1..20: mol_type = genomic DNA; note = Gene: SIGLEC7; note = Location (start to end; relative to TSS): SIGLEC7_37_67; note = Orientation (relative to transcription): antisense; note = sgRNA Position: 51142344; note = Sequence Name: 56322-704_101_SL_seq_12352
tggaggtgccagggccgcga

SEQ ID NO: 12353 - DNA, 20 bp, Homo sapiens
  source 1..20: mol_type = genomic DNA; note = Gene: SIGLEC7; note = Location (start to end; relative to TSS): SIGLEC7_73_103; note = Orientation (relative to transcription): sense; note = sgRNA Position: 51142400; note = Sequence Name: 56322-704_101_SL_seq_12353
tgctgctgcccctgctctgg

SEQ ID NO: 12354 - DNA, 20 bp, Homo sapiens
  source 1..20: mol_type = genomic DNA; note = Gene: SIGLEC7; note = Location (start to end; relative to TSS): SIGLEC7_38_68; note = Orientation (relative to transcription): antisense; note = sgRNA Position: 51142345; note = Sequence Name: 56322-704_101_SL_seq_12354
ttggaggtgccagggccgcg

SEQ ID NO: 12355 - DNA, 20 bp, Homo sapiens
  source 1..20: mol_type = genomic DNA; note = Gene: SIGLEC7; note = Location (start to end; relative to TSS): SIGLEC7_72_102; note = Orientation (relative to transcription): sense; note = sgRNA Position: 51142399; note = Sequence Name: 56322-704_101_SL_seq_12355
ctgctgctgcccctgctctg

SEQ ID NO: 12356 - DNA, 20 bp, Homo sapiens
  source 1..20: mol_type = genomic DNA; note = Gene: SIGLEC7; note = Location (start to end; relative to TSS): SIGLEC7_20_50; note = Orientation (relative to transcription): sense; note = sgRNA Position: 51142347; note = Sequence Name: 56322-704_101_SL_seq_12356
cagacgttccctcgcggccc

SEQ ID NO: 12357 - DNA, 20 bp, Homo sapiens
  source 1..20: mol_type = genomic DNA; note = Gene: SIGLEC7; note = Location (start to end; relative to TSS): SIGLEC7_57_87; note = Orientation (relative to transcription): antisense; note = sgRNA Position: 51142364; note = Sequence Name: 56322-704_101_SL_seq_12357
agcagcagcatatctggggt

SEQ ID NO: 12358 - DNA, 20 bp, Homo sapiens
  source 1..20: mol_type = genomic DNA; note = Gene: SIGLEC7; note = Location (start to end; relative to TSS): SIGLEC7_19_49; note = Orientation (relative to transcription): antisense; note = sgRNA Position: 51142326; note = Sequence Name: 56322-704_101_SL_seq_12358
gagggaacgtctgttcctca

SEQ ID NO: 12359 - DNA, 20 bp, Homo sapiens
  source 1..20: mol_type = genomic DNA; note = Gene: SIGLEC7; note = Location (start to end; relative to TSS): SIGLEC7_54_84; note = Orientation (relative to transcription): antisense; note = sgRNA Position: 51142361; note = Sequence Name: 56322-704_101_SL_seq_12359
agcagcatatctggggttgg

SEQ ID NO: 12360 - DNA, 20 bp, Homo sapiens
  source 1..20: mol_type = genomic DNA; note = Gene: SIGLEC8; note = Location (start to end; relative to TSS): SIGLEC8_45_75; note = Orientation (relative to transcription): antisense; note = sgRNA Position: 51458405; note = Sequence Name: 56322-704_101_SL_seq_12360
gtctgggtttgaaggcgcca

SEQ ID NO: 12361 - DNA, 20 bp, Homo sapiens
  source 1..20: mol_type = genomic DNA; note = Gene: SIGLEC8; note = Location (start to end; relative to TSS): SIGLEC8_82_112; note = Orientation (relative to transcription): sense; note = sgRNA Position: 51458348; note = Sequence Name: 56322-704_101_SL_seq_12361
gcccctgctctgggggacaa

SEQ ID NO: 12362 - DNA, 20 bp, Homo sapiens
  source 1..20: mol_type = genomic DNA; note = Gene: SIGLEC8; note = Location (start to end; relative to TSS): SIGLEC8_36_66; note = Orientation (relative to transcription): antisense; note = sgRNA Position: 51458414; note = Sequence Name: 56322-704_101_SL_seq_12362
tgaaggcgccagggccgcca

SEQ ID NO: 12363 - DNA, 20 bp, Homo sapiens
  source 1..20: mol_type = genomic DNA; note = Gene: SIGLEC8; note = Location (start to end; relative to TSS): SIGLEC8_75_105; note = Orientation (relative to transcription): sense; note = sgRNA Position: 51458355; note = Sequence Name: 56322-704_101_SL_seq_12363
tgctgctgcccctgctctgg

SEQ ID NO: 12364 - DNA, 20 bp, Homo sapiens
  source 1..20: mol_type = genomic DNA; note = Gene: SIGLEC8; note = Location (start to end; relative to TSS): SIGLEC8_37_67; note = Orientation (relative to transcription): antisense; note = sgRNA Position: 51458413; note = Sequence Name: 56322-704_101_SL_seq_12364
ttgaaggcgccagggccgcc

SEQ ID NO: 12365 - DNA, 20 bp, Homo sapiens
  source 1..20: mol_type = genomic DNA; note = Gene: SIGLEC8; note = Location (start to end; relative to TSS): SIGLEC8_74_104; note = Orientation (relative to transcription): sense; note = sgRNA Position: 51458356; note = Sequence Name: 56322-704_101_SL_seq_12365
ctgctgctgcccctgctctg

SEQ ID NO: 12366 - DNA, 20 bp, Homo sapiens
  source 1..20: mol_type = genomic DNA; note = Gene: SIGLEC8; note = Location (start to end; relative to TSS): SIGLEC8_18_48; note = Orientation (relative to transcription): antisense; note = sgRNA Position: 51458432; note = Sequence Name: 56322-704_101_SL_seq_12366
cagggaacgtctgttcctca

SEQ ID NO: 12367 - DNA, 20 bp, Homo sapiens
  source 1..20: mol_type = genomic DNA; note = Gene: SIGLEC8; note = Location (start to end; relative to TSS): SIGLEC8_61_91; note = Orientation (relative to transcription): antisense; note = sgRNA Position: 51458389; note = Sequence Name: 56322-704_101_SL_seq_12367
gcagcagcagcagcatgtct

SEQ ID NO: 12368 - DNA, 20 bp, Homo sapiens
  source 1..20: mol_type = genomic DNA; note = Gene: SIGLEC8; note = Location (start to end; relative to TSS): SIGLEC8_19_49; note = Orientation (relative to transcription): sense; note = sgRNA Position: 51458411; note = Sequence Name: 56322-704_101_SL_seq_12368
cagacgttccctggcggccc

SEQ ID NO: 12369 - DNA, 20 bp, Homo sapiens
  source 1..20: mol_type = genomic DNA; note = Gene: SIGLEC8; note = Location (start to end; relative to TSS): SIGLEC8_53_83; note = Orientation (relative to transcription): antisense; note = sgRNA Position: 51458397; note = Sequence Name: 56322-704_101_SL_seq_12369
agcagcatgtctgggtttga

SEQ ID NO: 12370 - DNA, 20 bp, Homo sapiens
  source 1..20: mol_type = genomic DNA; note = Gene: SIGLEC9; note = Location (start to end; relative to TSS): SIGLEC9_46_76; note = Orientation (relative to transcription): antisense; note = sgRNA Position: 51124958; note = Sequence Name: 56322-704_101_SL_seq_12370
gtctggggttagaggtgcca

SEQ ID NO: 12371 - DNA, 20 bp, Homo sapiens
  source 1..20: mol_type = genomic DNA; note = Gene: SIGLEC9; note = Location (start to end; relative to TSS): SIGLEC9_79_109; note = Orientation (relative to transcription): sense; note = sgRNA Position: 51125011; note = Sequence Name: 56322-704_101_SL_seq_12371
ccctgctctgggggagggag

SEQ ID NO: 12372 - DNA, 20 bp, Homo sapiens
  source 1..20: mol_type = genomic DNA; note = Gene: SIGLEC9; note = Location (start to end; relative to TSS): SIGLEC9_37_67; note = Orientation (relative to transcription): antisense; note = sgRNA Position: 51124949; note = Sequence Name: 56322-704_101_SL_seq_12372
tagaggtgccagggccgcga

SEQ ID NO: 12373 - DNA, 20 bp, Homo sapiens
  source 1..20: mol_type = genomic DNA; note = Gene: SIGLEC9; note = Location (start to end; relative to TSS): SIGLEC9_70_100; note = Orientation (relative to transcription): sense; note = sgRNA Position: 51125002; note = Sequence Name: 56322-704_101_SL_seq_12373
tgctgctgcccctgctctgg

SEQ ID NO: 12374 - DNA, 20 bp, Homo sapiens
  source 1..20: mol_type = genomic DNA; note = Gene: SIGLEC9; note = Location (start to end; relative to TSS): SIGLEC9_38_68; note = Orientation (relative to transcription): antisense; note = sgRNA Position: 51124950; note = Sequence Name: 56322-704_101_SL_seq_12374
ttagaggtgccagggccgcg

SEQ ID NO: 12375 - DNA, 20 bp, Homo sapiens
  source 1..20: mol_type = genomic DNA; note = Gene: SIGLEC9; note = Location (start to end; relative to TSS): SIGLEC9_69_99; note = Orientation (relative to transcription): sense; note = sgRNA Position: 51125001; note = Sequence Name: 56322-704_101_SL_seq_12375
ctgctgctgcccctgctctg

SEQ ID NO: 12376 - DNA, 20 bp, Homo sapiens
  source 1..20: mol_type = genomic DNA; note = Gene: SIGLEC9; note = Location (start to end; relative to TSS): SIGLEC9_19_49; note = Orientation (relative to transcription): antisense; note = sgRNA Position: 51124931; note = Sequence Name: 56322-704_101_SL_seq_12376
gagggaacgtctgttcctca

SEQ ID NO: 12377 - DNA, 20 bp, Homo sapiens
  source 1..20: mol_type = genomic DNA; note = Gene: SIGLEC9; note = Location (start to end; relative to TSS): SIGLEC9_61_91; note = Orientation (relative to transcription): antisense; note = sgRNA Position: 51124973; note = Sequence Name: 56322-704_101_SL_seq_12377
cagcagcagcagcatgtctg

SEQ ID NO: 12378 - DNA, 20 bp, Homo sapiens
  source 1..20: mol_type = genomic DNA; note = Gene: SIGLEC9; note = Location (start to end; relative to TSS): SIGLEC9_20_50; note = Orientation (relative to transcription): sense; note = sgRNA Position: 51124952; note = Sequence Name: 56322-704_101_SL_seq_12378
cagacgttccctcgcggccc

SEQ ID NO: 12379 - DNA, 20 bp, Homo sapiens
  source 1..20: mol_type = genomic DNA; note = Gene: SIGLEC9; note = Location (start to end; relative to TSS): SIGLEC9_54_84; note = Orientation (relative to transcription): antisense; note = sgRNA Position: 51124966; note = Sequence Name: 56322-704_101_SL_seq_12379
agcagcatgtctggggttag

SEQ ID NO: 12380 - DNA, 20 bp, Homo sapiens
  source 1..20: mol_type = genomic DNA; note = Gene: SIRPA; note = Location (start to end; relative to TSS): SIRPA_32_62; note = Orientation (relative to transcription): antisense; note = sgRNA Position: 1895445; note = Sequence Name: 56322-704_101_SL_seq_12380
ccggcgggctccatgggccg

SEQ ID NO: 12381 - DNA, 20 bp, Homo sapiens
  source 1..20: mol_type = genomic DNA; note = Gene: SIRPA; note = Location (start to end; relative to TSS): SIRPA_105_135; note = Orientation (relative to transcription): antisense; note = sgRNA Position: 1895518; note = Sequence Name: 56322-704_101_SL_seq_12381
gtgcttacctgaccaggcgc

SEQ ID NO: 12382 - DNA, 20 bp, Homo sapiens
  source 1..20: mol_type = genomic DNA; note = Gene: SIRPA; note = Location (start to end; relative to TSS): SIRPA_39_69; note = Orientation (relative to transcription): antisense; note = sgRNA Position: 1895452; note = Sequence Name: 56322-704_101_SL_seq_12382
ggccgggccggcgggctcca

SEQ ID NO: 12383 - DNA, 20 bp, Homo sapiens
  source 1..20: mol_type = genomic DNA; note = Gene: SIRPA; note = Location (start to end; relative to TSS): SIRPA_99_129; note = Orientation (relative to transcription): antisense; note = sgRNA Position: 1895512; note = Sequence Name: 56322-704_101_SL_seq_12383
acctgaccaggcgcaggacg

SEQ ID NO: 12384 - DNA, 20 bp, Homo sapiens
  source 1..20: mol_type = genomic DNA; note = Gene: SIRPA; note = Location (start to end; relative to TSS): SIRPA_19_49; note = Orientation (relative to transcription): antisense; note = sgRNA Position: 1895432; note = Sequence Name: 56322-704_101_SL_seq_12384
tgggccgcggctgcggagcg

SEQ ID NO: 12385 - DNA, 20 bp, Homo sapiens
  source 1..20: mol_type = genomic DNA; note = Gene: SIRPA; note = Location (start to end; relative to TSS): SIRPA_89_119; note = Orientation (relative to transcription): sense; note = sgRNA Position: 1895522; note = Sequence Name: 56322-704_101_SL_seq_12385
gccgcgtcctgcgcctggtc

SEQ ID NO: 12386 - DNA, 20 bp, Homo sapiens
  source 1..20: mol_type = genomic DNA; note = Gene: SIRPA; note = Location (start to end; relative to TSS): SIRPA_23_53; note = Orientation (relative to transcription): sense; note = sgRNA Position: 1895456; note = Sequence Name: 56322-704_101_SL_seq_12386
ccgcggcccatggagcccgc

SEQ ID NO: 12387 - DNA, 20 bp, Homo sapiens
  source 1..20: mol_type = genomic DNA; note = Gene: SIRPA; note = Location (start to end; relative to TSS): SIRPA_84_114; note = Orientation (relative to transcription): sense; note = sgRNA Position: 1895517; note = Sequence Name: 56322-704_101_SL_seq_12387
tgctcgccgcgtcctgcgcc

SEQ ID NO: 12388 - DNA, 20 bp, Homo sapiens
  source 1..20: mol_type = genomic DNA; note = Gene: SIRPA; note = Location (start to end; relative to TSS): SIRPA_16_46; note = Orientation (relative to transcription): antisense; note = sgRNA Position: 1895429; note = Sequence Name: 56322-704_101_SL_seq_12388
gccgcggctgcggagcgagg

SEQ ID NO: 12389 - DNA, 20 bp, Homo sapiens
  source 1..20: mol_type = genomic DNA; note = Gene: SIRPA; note = Location (start to end; relative to TSS): SIRPA_60_90; note = Orientation (relative to transcription): antisense; note = sgRNA Position: 1895473; note = Sequence Name: 56322-704_101_SL_seq_12389
cagcggcccgaggcggccgg

SEQ ID NO: 12390 - DNA, 20 bp, Homo sapiens
  source 1..20: mol_type = genomic DNA; note = Gene: SIRPB1; note = Location (start to end; relative to TSS): SIRPB1_55_85; note = Orientation (relative to transcription): sense; note = sgRNA Position: 1619930; note = Sequence Name: 56322-704_101_SL_seq_12390
gaatgcccgtgccagcctcc

SEQ ID NO: 12391 - DNA, 20 bp, Homo sapiens
  source 1..20: mol_type = genomic DNA; note = Gene: SIRPB1; note = Location (start to end; relative to TSS): SIRPB1_87_117; note = Orientation (relative to transcription): antisense; note = sgRNA Position: 1619918; note = Sequence Name: 56322-704_101_SL_seq_12391
aggaaaggactaggaaggtg

SEQ ID NO: 12392 - DNA, 20 bp, Homo sapiens
  source 1..20: mol_type = genomic DNA; note = Gene: SIRPB1; note = Location (start to end; relative to TSS): SIRPB1_51_81; note = Orientation (relative to transcription): antisense; note = sgRNA Position: 1619954; note = Sequence Name: 56322-704_101_SL_seq_12392
acgggcattctggagacctt

SEQ ID NO: 12393 - DNA, 20 bp, Homo sapiens
  source 1..20: mol_type = genomic DNA; note = Gene: SIRPB1; note = Location (start to end; relative to TSS): SIRPB1_82_112; note = Orientation (relative to transcription): antisense; note = sgRNA Position: 1619923; note = Sequence Name: 56322-704_101_SL_seq_12393
aggactaggaaggtggggcc

SEQ ID NO: 12394 - DNA, 20 bp, Homo sapiens
  source 1..20: mol_type = genomic DNA; note = Gene: SIRPB1; note = Location (start to end; relative to TSS): SIRPB1_22_52; note = Orientation (relative to transcription): antisense; note = sgRNA Position: 1619983; note = Sequence Name: 56322-704_101_SL_seq_12394
ctctgtccaaacgtctgtgc

SEQ ID NO: 12395 - DNA, 20 bp, Homo sapiens
  source 1..20: mol_type = genomic DNA; note = Gene: SIRPB1; note = Location (start to end; relative to TSS): SIRPB1_69_99; note = Orientation (relative to transcription): antisense; note = sgRNA Position: 1619936; note = Sequence Name: 56322-704_101_SL_seq_12395
tggggccaggaggctggcac

SEQ ID NO: 12396 - DNA, 20 bp, Homo sapiens
  source 1..20: mol_type = genomic DNA; note = Gene: SIRPB1; note = Location (start to end; relative to TSS): SIRPB1_21_51; note = Orientation (relative to transcription): antisense; note = sgRNA Position: 1619984; note = Sequence Name: 56322-704_101_SL_seq_12396
tctgtccaaacgtctgtgct

SEQ ID NO: 12397 - DNA, 20 bp, Homo sapiens
  source 1..20: mol_type = genomic DNA; note = Gene: SIRPB1; note = Location (start to end; relative to TSS): SIRPB1_55_85; note = Orientation (relative to transcription): sense; note = sgRNA Position: 1619930; note = Sequence Name: 56322-704_101_SL_seq_12397
gaatgcccgtgccagcctcc

SEQ ID NO: 12398 - DNA, 20 bp, Homo sapiens
  source 1..20: mol_type = genomic DNA; note = Gene: SIRPB1; note = Location (start to end; relative to TSS): SIRPB1_7_37; note = Orientation (relative to transcription): sense; note = sgRNA Position: 1619978; note = Sequence Name: 56322-704_101_SL_seq_12398
atcttcccagcacagacgtt

SEQ ID NO: 12399 - DNA, 20 bp, Homo sapiens
  source 1..20: mol_type = genomic DNA; note = Gene: SIRPB1; note = Location (start to end; relative to TSS): SIRPB1_51_81; note = Orientation (relative to transcription): antisense; note = sgRNA Position: 1619954; note = Sequence Name: 56322-704_101_SL_seq_12399
acgggcattctggagacctt

SEQ ID NO: 12400 - DNA, 20 bp, Homo sapiens
  source 1..20: mol_type = genomic DNA; note = Gene: SIRPB2; note = Location (start to end; relative to TSS): SIRPB2_48_78; note = Orientation (relative to transcription): antisense; note = sgRNA Position: 1491368; note = Sequence Name: 56322-704_101_SL_seq_12400
ggagcacatggcatcttctg

SEQ ID NO: 12401 - DNA, 20 bp, Homo sapiens
  source 1..20: mol_type = genomic DNA; note = Gene: SIRPB2; note = Location (start to end; relative to TSS): SIRPB2_83_113; note = Orientation (relative to transcription): antisense; note = sgRNA Position: 1491333; note = Sequence Name: 56322-704_101_SL_seq_12401
ggcaagtgggccaggcaggt

SEQ ID NO: 12402 - DNA, 20 bp, Homo sapiens
  source 1..20: mol_type = genomic DNA; note = Gene: SIRPB2; note = Location (start to end; relative to TSS): SIRPB2_49_79; note = Orientation (relative to transcription): sense; note = sgRNA Position: 1491347; note = Sequence Name: 56322-704_101_SL_seq_12402
tgccatgtgctccacgatgt

SEQ ID NO: 12403 - DNA, 20 bp, Homo sapiens
  source 1..20: mol_type = genomic DNA; note = Gene: SIRPB2; note = Location (start to end; relative to TSS): SIRPB2_82_112; note = Orientation (relative to transcription): antisense; note = sgRNA Position: 1491334; note = Sequence Name: 56322-704_101_SL_seq_12403
gcaagtgggccaggcaggtg

SEQ ID NO: 12404 - DNA, 20 bp, Homo sapiens
  source 1..20: mol_type = genomic DNA; note = Gene: SIRPB2; note = Location (start to end; relative to TSS): SIRPB2_32_62; note = Orientation (relative to transcription): antisense; note = sgRNA Position: 1491384; note = Sequence Name: 56322-704_101_SL_seq_12404
tctgtggtccccaagacttg

SEQ ID NO: 12405 - DNA, 20 bp, Homo sapiens
  source 1..20: mol_type = genomic DNA; note = Gene: SIRPB2; note = Location (start to end; relative to TSS): SIRPB2_81_111; note = Orientation (relative to transcription): antisense; note = sgRNA Position: 1491335; note = Sequence Name: 56322-704_101_SL_seq_12405
caagtgggccaggcaggtgg

SEQ ID NO: 12406 - DNA, 20 bp, Homo sapiens
  source 1..20: mol_type = genomic DNA; note = Gene: SIRPB2; note = Location (start to end; relative to TSS): SIRPB2_33_63; note = Orientation (relative to transcription): antisense; note = sgRNA Position: 1491383; note = Sequence Name: 56322-704_101_SL_seq_12406
ttctgtggtccccaagactt

SEQ ID NO: 12407 - DNA, 20 bp, Homo sapiens
  source 1..20: mol_type = genomic DNA; note = Gene: SIRPB2; note = Location (start to end; relative to TSS): SIRPB2_69_99; note = Orientation (relative to transcription): antisense; note = sgRNA Position: 1491347; note = Sequence Name: 56322-704_101_SL_seq_12407
gcaggtgggggccgacatcg

SEQ ID NO: 12408 - DNA, 20 bp, Homo sapiens
  source 1..20: mol_type = genomic DNA; note = Gene: SIRPB2; note = Location (start to end; relative to TSS): SIRPB2_34_64; note = Orientation (relative to transcription): antisense; note = sgRNA Position: 1491382; note = Sequence Name: 56322-704_101_SL_seq_12408
cttctgtggtccccaagact

SEQ ID NO: 12409 - DNA, 20 bp, Homo sapiens
  source 1..20: mol_type = genomic DNA; note = Gene: SIRPB2; note = Location (start to end; relative to TSS): SIRPB2_64_94; note = Orientation (relative to transcription): sense; note = sgRNA Position: 1491332; note = Sequence Name: 56322-704_101_SL_seq_12409
gatgtcggcccccacctgcc

SEQ ID NO: 12410 - DNA, 20 bp, Homo sapiens
  source 1..20: mol_type = genomic DNA; note = Gene: SIRPD; note = Location (start to end; relative to TSS): SIRPD_56_86; note = Orientation (relative to transcription): antisense; note = sgRNA Position: 1557645; note = Sequence Name: 56322-704_101_SL_seq_12410
tggagtggggaggcagggat

SEQ ID NO: 12411 - DNA, 20 bp, Homo sapiens
  source 1..20: mol_type = genomic DNA; note = Gene: SIRPD; note = Location (start to end; relative to TSS): SIRPD_93_123; note = Orientation (relative to transcription): antisense; note = sgRNA Position: 1557608; note = Sequence Name: 56322-704_101_SL_seq_12411
aagcagcagatacagcagta

SEQ ID NO: 12412 - DNA, 20 bp, Homo sapiens
  source 1..20: mol_type = genomic DNA; note = Gene: SIRPD; note = Location (start to end; relative to TSS): SIRPD_57_87; note = Orientation (relative to transcription): antisense; note = sgRNA Position: 1557644; note = Sequence Name: 56322-704_101_SL_seq_12412
gtggagtggggaggcaggga

SEQ ID NO: 12413 - DNA, 20 bp, Homo sapiens
  source 1..20: mol_type = genomic DNA; note = Gene: SIRPD; note = Location (start to end; relative to TSS): SIRPD_91_121; note = Orientation (relative to transcription): sense; note = sgRNA Position: 1557590; note = Sequence Name: 56322-704_101_SL_seq_12413
gctgtatctgctgcttgaac

SEQ ID NO: 12414 - DNA, 20 bp, Homo sapiens
  source 1..20: mol_type = genomic DNA; note = Gene: SIRPD; note = Location (start to end; relative to TSS): SIRPD_38_68; note = Orientation (relative to transcription): antisense; note = sgRNA Position: 1557663; note = Sequence Name: 56322-704_101_SL_seq_12414
atgggcattgtggtgaaacc

SEQ ID NO: 12415 - DNA, 20 bp, Homo sapiens
  source 1..20: mol_type = genomic DNA; note = Gene: SIRPD; note = Location (start to end; relative to TSS): SIRPD_89_119; note = Orientation (relative to transcription): antisense; note = sgRNA Position: 1557612; note = Sequence Name: 56322-704_101_SL_seq_12415
agcagatacagcagtaagga

SEQ ID NO: 12416 - DNA, 20 bp, Homo sapiens
  source 1..20: mol_type = genomic DNA; note = Gene: SIRPD; note = Location (start to end; relative to TSS): SIRPD_48_78; note = Orientation (relative to transcription): antisense; note = sgRNA Position: 1557653; note = Sequence Name: 56322-704_101_SL_seq_12416
ggaggcagggatgggcattg

SEQ ID NO: 12417 - DNA, 20 bp, Homo sapiens
  source 1..20: mol_type = genomic DNA; note = Gene: SIRPD; note = Location (start to end; relative to TSS): SIRPD_83_113; note = Orientation (relative to transcription): antisense; note = sgRNA Position: 1557618; note = Sequence Name: 56322-704_101_SL_seq_12417
tacagcagtaaggaaggcag

SEQ ID NO: 12418 - DNA, 20 bp, Homo sapiens
  source 1..20: mol_type = genomic DNA; note = Gene: SIRPD; note = Location (start to end; relative to TSS): SIRPD_9_39; note = Orientation (relative to transcription): antisense; note = sgRNA Position: 1557692; note = Sequence Name: 56322-704_101_SL_seq_12418
ctctgcctgaatgcctgtcc

SEQ ID NO: 12419 - DNA, 20 bp, Homo sapiens
  source 1..20: mol_type = genomic DNA; note = Gene: SIRPD; note = Location (start to end; relative to TSS): SIRPD_48_78; note = Orientation (relative to transcription): antisense; note = sgRNA Position: 1557653; note = Sequence Name: 56322-704_101_SL_seq_12419
ggaggcagggatgggcattg

SEQ ID NO: 12420 - DNA, 20 bp, Homo sapiens
  source 1..20: mol_type = genomic DNA; note = Gene: SIRPG; note = Location (start to end; relative to TSS): SIRPG_69_99; note = Orientation (relative to transcription): antisense; note = sgRNA Position: 1657706; note = Sequence Name: 56322-704_101_SL_seq_12420
tggggccaggaggctgggac

SEQ ID NO: 12421 - DNA, 20 bp, Homo sapiens
  source 1..20: mol_type = genomic DNA; note = Gene: SIRPG; note = Location (start to end; relative to TSS): SIRPG_99_129; note = Orientation (relative to transcription): sense; note = sgRNA Position: 1657656; note = Sequence Name: 56322-704_101_SL_seq_12421
ctgcttctgactctactgct

SEQ ID NO: 12422 - DNA, 20 bp, Homo sapiens
  source 1..20: mol_type = genomic DNA; note = Gene: SIRPG; note = Location (start to end; relative to TSS): SIRPG_55_85; note = Orientation (relative to transcription): sense; note = sgRNA Position: 1657700; note = Sequence Name: 56322-704_101_SL_seq_12422
aaatgcctgtcccagcctcc

SEQ ID NO: 12423 - DNA, 20 bp, Homo sapiens
  source 1..20: mol_type = genomic DNA; note = Gene: SIRPG; note = Location (start to end; relative to TSS): SIRPG_87_117; note = Orientation (relative to transcription): antisense; note = sgRNA Position: 1657688; note = Sequence Name: 56322-704_101_SL_seq_12423
aggaaaggaccaggaggatg

SEQ ID NO: 12424 - DNA, 20 bp, Homo sapiens
  source 1..20: mol_type = genomic DNA; note = Gene: SIRPG; note = Location (start to end; relative to TSS): SIRPG_21_51; note = Orientation (relative to transcription): antisense; note = sgRNA Position: 1657754; note = Sequence Name: 56322-704_101_SL_seq_12424
tctgttcaaacgtctgttct

SEQ ID NO: 12425 - DNA, 20 bp, Homo sapiens
  source 1..20: mol_type = genomic DNA; note = Gene: SIRPG; note = Location (start to end; relative to TSS): SIRPG_74_104; note = Orientation (relative to transcription): antisense; note = sgRNA Position: 1657701; note = Sequence Name: 56322-704_101_SL_seq_12425
gaggatggggccaggaggct

SEQ ID NO: 12426 - DNA, 20 bp, Homo sapiens
  source 1..20: mol_type = genomic DNA; note = Gene: SIRPG; note = Location (start to end; relative to TSS): SIRPG_20_50; note = Orientation (relative to transcription): antisense; note = sgRNA Position: 1657755; note = Sequence Name: 56322-704_101_SL_seq_12426
ctgttcaaacgtctgttctg

SEQ ID NO: 12427 - DNA, 20 bp, Homo sapiens
  source 1..20: mol_type = genomic DNA; note = Gene: SIRPG; note = Location (start to end; relative to TSS): SIRPG_69_99; note = Orientation (relative to transcription): antisense; note = sgRNA Position: 1657706; note = Sequence Name: 56322-704_101_SL_seq_12427
tggggccaggaggctgggac

SEQ ID NO: 12428 - DNA, 20 bp, Homo sapiens
  source 1..20: mol_type = genomic DNA; note = Gene: SIRPG; note = Location (start to end; relative to TSS): SIRPG_10_40; note = Orientation (relative to transcription): antisense; note = sgRNA Position: 1657765; note = Sequence Name: 56322-704_101_SL_seq_12428
gtctgttctggggagatgtc

SEQ ID NO: 12429 - DNA, 20 bp, Homo sapiens
  source 1..20: mol_type = genomic DNA; note = Gene: SIRPG; note = Location (start to end; relative to TSS): SIRPG_55_85; note = Orientation (relative to transcription): sense; note = sgRNA Position: 1657700; note = Sequence Name: 56322-704_101_SL_seq_12429
aaatgcctgtcccagcctcc

SEQ ID NO: 12430 - DNA, 20 bp, Homo sapiens
  source 1..20: mol_type = genomic DNA; note = Gene: SLAMF1; note = Location (start to end; relative to TSS): SLAMF1_43_73; note = Orientation (relative to transcription): sense; note = sgRNA Position: 160646977; note = Sequence Name: 56322-704_101_SL_seq_12430
gcagctgccaggctccggcc

SEQ ID NO: 12431 - DNA, 20 bp, Homo sapiens
  source 1..20: mol_type = genomic DNA; note = Gene: SLAMF1; note = Location (start to end; relative to TSS): SLAMF1_77_107; note = Orientation (relative to transcription): antisense; note = sgRNA Position: 160646963; note = Sequence Name: 56322-704_101_SL_seq_12431
cagccaatgaggagaaggaa

SEQ ID NO: 12432 - DNA, 20 bp, Homo sapiens
  source 1..20: mol_type = genomic DNA; note = Gene: SLAMF1; note = Location (start to end; relative to TSS): SLAMF1_38_68; note = Orientation (relative to transcription): sense; note = sgRNA Position: 160646982; note = Sequence Name: 56322-704_101_SL_seq_12432
tgtgagcagctgccaggctc

SEQ ID NO: 12433 - DNA, 20 bp, Homo sapiens
  source 1..20: mol_type = genomic DNA; note = Gene: SLAMF1; note = Location (start to end; relative to TSS): SLAMF1_70_100; note = Orientation (relative to transcription): antisense; note = sgRNA Position: 160646970; note = Sequence Name: 56322-704_101_SL_seq_12433
tgaggagaaggaagggatcc

SEQ ID NO: 12434 - DNA, 20 bp, Homo sapiens
  source 1..20: mol_type = genomic DNA; note = Gene: SLAMF1; note = Location (start to end; relative to TSS): SLAMF1_32_62; note = Orientation (relative to transcription): sense; note = sgRNA Position: 160646988; note = Sequence Name: 56322-704_101_SL_seq_12434
ggcatctgtgagcagctgcc

SEQ ID NO: 12435 - DNA, 20 bp, Homo sapiens
  source 1..20: mol_type = genomic DNA; note = Gene: SLAMF1; note = Location (start to end; relative to TSS): SLAMF1_65_95; note = Orientation (relative to transcription): sense; note = sgRNA Position: 160646955; note = Sequence Name: 56322-704_101_SL_seq_12435
gatcccttccttctcctcat

SEQ ID NO: 12436 - DNA, 20 bp, Homo sapiens
  source 1..20: mol_type = genomic DNA; note = Gene: SLAMF1; note = Location (start to end; relative to TSS): SLAMF1_11_41; note = Orientation (relative to transcription): sense; note = sgRNA Position: 160647009; note = Sequence Name: 56322-704_101_SL_seq_12436
acacgaagcttgcttctgcc

SEQ ID NO: 12437 - DNA, 20 bp, Homo sapiens
  source 1..20: mol_type = genomic DNA; note = Gene: SLAMF1; note = Location (start to end; relative to TSS): SLAMF1_43_73; note = Orientation (relative to transcription): sense; note = sgRNA Position: 160646977; note = Sequence Name: 56322-704_101_SL_seq_12437
gcagctgccaggctccggcc

SEQ ID NO: 12438 - DNA, 20 bp, Homo sapiens
  source 1..20: mol_type = genomic DNA; note = Gene: SLAMF1; note = Location (start to end; relative to TSS): SLAMF1_7_37; note = Orientation (relative to transcription): antisense; note = sgRNA Position: 160647033; note = Sequence Name: 56322-704_101_SL_seq_12438
agcttcgtgtcatgcagcag

SEQ ID NO: 12439 - DNA, 20 bp, Homo sapiens
  source 1..20: mol_type = genomic DNA; note = Gene: SLAMF1; note = Location (start to end; relative to TSS): SLAMF1_38_68; note = Orientation (relative to transcription): sense; note = sgRNA Position: 160646982; note = Sequence Name: 56322-704_101_SL_seq_12439
tgtgagcagctgccaggctc

SEQ ID NO: 12440 - DNA, 20 bp, Homo sapiens
  source 1..20: mol_type = genomic DNA; note = Gene: SLAMF6; note = Location (start to end; relative to TSS): SLAMF6_26_56; note = Orientation (relative to transcription): antisense; note = sgRNA Position: 160523225; note = Sequence Name: 56322-704_101_SL_seq_12440
gactggtgcttgagaccttg

SEQ ID NO: 12441 - DNA, 20 bp, Homo sapiens
  source 1..20: mol_type = genomic DNA; note = Gene: SLAMF6; note = Location (start to end; relative to TSS): SLAMF6_109_139; note = Orientation (relative to transcription): antisense; note = sgRNA Position: 160523142; note = Sequence Name: 56322-704_101_SL_seq_12441
gatctggattgacatttacc

SEQ ID NO: 12442 - DNA, 20 bp, Homo sapiens
  source 1..20: mol_type = genomic DNA; note = Gene: SLAMF6; note = Location (start to end; relative to TSS): SLAMF6_41_71; note = Orientation (relative to transcription): sense; note = sgRNA Position: 160523190; note = Sequence Name: 56322-704_101_SL_seq_12442
tcaccgcggaaagcatgttg

SEQ ID NO: 12443 - DNA, 20 bp, Homo sapiens
  source 1..20: mol_type = genomic DNA; note = Gene: SLAMF6; note = Location (start to end; relative to TSS): SLAMF6_108_138; note = Orientation (relative to transcription): antisense; note = sgRNA Position: 160523143; note = Sequence Name: 56322-704_101_SL_seq_12443
atctggattgacatttacct

SEQ ID NO: 12444 - DNA, 20 bp, Homo sapiens
  source 1..20: mol_type = genomic DNA; note = Gene: SLAMF6; note = Location (start to end; relative to TSS): SLAMF6_53_83; note = Orientation (relative to transcription): antisense; note = sgRNA Position: 160523198; note = Sequence Name: 56322-704_101_SL_seq_12444
cagccacaacatgctttccg

SEQ ID NO: 12445 - DNA, 20 bp, Homo sapiens
  source 1..20: mol_type = genomic DNA; note = Gene: SLAMF6; note = Location (start to end; relative to TSS): SLAMF6_102_132; note = Orientation (relative to transcription): sense; note = sgRNA Position: 160523129; note = Sequence Name: 56322-704_101_SL_seq_12445
aggtaaatgtcaatccagat

SEQ ID NO: 12446 - DNA, 20 bp, Homo sapiens
  source 1..20: mol_type = genomic DNA; note = Gene: SLAMF6; note = Location (start to end; relative to TSS): SLAMF6_2_32; note = Orientation (relative to transcription): sense; note = sgRNA Position: 160523229; note = Sequence Name: 56322-704_101_SL_seq_12446
caaaaacattgactgcctca

SEQ ID NO: 12447 - DNA, 20 bp, Homo sapiens
  source 1..20: mol_type = genomic DNA; note = Gene: SLAMF6; note = Location (start to end; relative to TSS): SLAMF6_41_71; note = Orientation (relative to transcription): sense; note = sgRNA Position: 160523190; note = Sequence Name: 56322-704_101_SL_seq_12447
tcaccgcggaaagcatgttg

SEQ ID NO: 12448 - DNA, 20 bp, Homo sapiens
  source 1..20: mol_type = genomic DNA; note = Gene: SLAMF6; note = Location (start to end; relative to TSS): SLAMF6_-21_9; note = Orientation (relative to transcription): sense; note = sgRNA Position: 160523252; note = Sequence Name: 56322-704_101_SL_seq_12448
attttcagtttatgacagaa

SEQ ID NO: 12449 - DNA, 20 bp, Homo sapiens
  source 1..20: mol_type = genomic DNA; note = Gene: SLAMF6; note = Location (start to end; relative to TSS): SLAMF6_26_56; note = Orientation (relative to transcription): antisense; note = sgRNA Position: 160523225; note = Sequence Name: 56322-704_101_SL_seq_12449
gactggtgcttgagaccttg

SEQ ID NO: 12450 - DNA, 20 bp, Homo sapiens
  source 1..20: mol_type = genomic DNA; note = Gene: SLAMF7; note = Location (start to end; relative to TSS): SLAMF7_65_95; note = Orientation (relative to transcription): antisense; note = sgRNA Position: 160739318; note = Sequence Name: 56322-704_101_SL_seq_12450
gatgagggtgaggcatgttg

SEQ ID NO: 12451 - DNA, 20 bp, Homo sapiens
  source 1..20: mol_type = genomic DNA; note = Gene: SLAMF7; note = Location (start to end; relative to TSS): SLAMF7_120_150; note = Orientation (relative to transcription): antisense; note = sgRNA Position: 160739373; note = Sequence Name: 56322-704_101_SL_seq_12451
caggagagtggaagagaatc

SEQ ID NO: 12452 - DNA, 20 bp, Homo sapiens
  source 1..20: mol_type = genomic DNA; note = Gene: SLAMF7; note = Location (start to end; relative to TSS): SLAMF7_66_96; note = Orientation (relative to transcription): antisense; note = sgRNA Position: 160739319; note = Sequence Name: 56322-704_101_SL_seq_12452
agatgagggtgaggcatgtt

SEQ ID NO: 12453 - DNA, 20 bp, Homo sapiens
  source 1..20: mol_type = genomic DNA; note = Gene: SLAMF7; note = Location (start to end; relative to TSS): SLAMF7_116_146; note = Orientation (relative to transcription): antisense; note = sgRNA Position: 160739369; note = Sequence Name: 56322-704_101_SL_seq_12453
agagtggaagagaatccggc

SEQ ID NO: 12454 - DNA, 20 bp, Homo sapiens
  source 1..20: mol_type = genomic DNA; note = Gene: SLAMF7; note = Location (start to end; relative to TSS): SLAMF7_43_73; note = Orientation (relative to transcription): antisense; note = sgRNA Position: 160739296; note = Sequence Name: 56322-704_101_SL_seq_12454
gaaccagccatattgctctc

SEQ ID NO: 12455 - DNA, 20 bp, Homo sapiens
  source 1..20: mol_type = genomic DNA; note = Gene: SLAMF7; note = Location (start to end; relative to TSS): SLAMF7_75_105; note = Orientation (relative to transcription): antisense; note = sgRNA Position: 160739328; note = Sequence Name: 56322-704_101_SL_seq_12455
aaaggatatagatgagggtg

SEQ ID NO: 12456 - DNA, 20 bp, Homo sapiens
  source 1..20: mol_type = genomic DNA; note = Gene: SLAMF7; note = Location (start to end; relative to TSS): SLAMF7_6_36; note = Orientation (relative to transcription): antisense; note = sgRNA Position: 160739259; note = Sequence Name: 56322-704_101_SL_seq_12456
aatgaagccacttccctctt

SEQ ID NO: 12457 - DNA, 20 bp, Homo sapiens
  source 1..20: mol_type = genomic DNA; note = Gene: SLAMF7; note = Location (start to end; relative to TSS): SLAMF7_65_95; note = Orientation (relative to transcription): antisense; note = sgRNA Position: 160739318; note = Sequence Name: 56322-704_101_SL_seq_12457
gatgagggtgaggcatgttg

SEQ ID NO: 12458 - DNA, 20 bp, Homo sapiens
  source 1..20: mol_type = genomic DNA; note = Gene: SLAMF7; note = Location (start to end; relative to TSS): SLAMF7_4_34; note = Orientation (relative to transcription): sense; note = sgRNA Position: 160739277; note = Sequence Name: 56322-704_101_SL_seq_12458
gggaagtggcttcatttcag

SEQ ID NO: 12459 - DNA, 20 bp, Homo sapiens
  source 1..20: mol_type = genomic DNA; note = Gene: SLAMF7; note = Location (start to end; relative to TSS): SLAMF7_43_73; note = Orientation (relative to transcription): antisense; note = sgRNA Position: 160739296; note = Sequence Name: 56322-704_101_SL_seq_12459
gaaccagccatattgctctc

SEQ ID NO: 12460 - DNA, 20 bp, Homo sapiens
  source 1..20: mol_type = genomic DNA; note = Gene: SLAMF8; note = Location (start to end; relative to TSS): SLAMF8_44_74; note = Orientation (relative to transcription): sense; note = sgRNA Position: 159826943; note = Sequence Name: 56322-704_101_SL_seq_12460
cttctctgggaaggtaagtg

SEQ ID NO: 12461 - DNA, 20 bp, Homo sapiens
  source 1..20: mol_type = genomic DNA; note = Gene: SLAMF8; note = Location (start to end; relative to TSS): SLAMF8_109_139; note = Orientation (relative to transcription): antisense; note = sgRNA Position: 159826988; note = Sequence Name: 56322-704_101_SL_seq_12461
tggcataggcagctggggag

SEQ ID NO: 12462 - DNA, 20 bp, Homo sapiens
  source 1..20: mol_type = genomic DNA; note = Gene: SLAMF8; note = Location (start to end; relative to TSS): SLAMF8_43_73; note = Orientation (relative to transcription): sense; note = sgRNA Position: 159826942; note = Sequence Name: 56322-704_101_SL_seq_12462
gcttctctgggaaggtaagt

SEQ ID NO: 12463 - DNA, 20 bp, Homo sapiens
  source 1..20: mol_type = genomic DNA; note = Gene: SLAMF8; note = Location (start to end; relative to TSS): SLAMF8_92_122; note = Orientation (relative to transcription): antisense; note = sgRNA Position: 159826971; note = Sequence Name: 56322-704_101_SL_seq_12463
gaggggccttcagctctccg

SEQ ID NO: 12464 - DNA, 20 bp, Homo sapiens
  source 1..20: mol_type = genomic DNA; note = Gene: SLAMF8; note = Location (start to end; relative to TSS): SLAMF8_42_72; note = Orientation (relative to transcription): sense; note = sgRNA Position: 159826941; note = Sequence Name: 56322-704_101_SL_seq_12464
tgcttctctgggaaggtaag

SEQ ID NO: 12465 - DNA, 20 bp, Homo sapiens
  source 1..20: mol_type = genomic DNA; note = Gene: SLAMF8; note = Location (start to end; relative to TSS): SLAMF8_87_117; note = Orientation (relative to transcription): antisense; note = sgRNA Position: 159826966; note = Sequence Name: 56322-704_101_SL_seq_12465
gccttcagctctccgaggac

SEQ ID NO: 12466 - DNA, 20 bp, Homo sapiens
  source 1..20: mol_type = genomic DNA; note = Gene: SLAMF8; note = Location (start to end; relative to TSS): SLAMF8_35_65; note = Orientation (relative to transcription): sense; note = sgRNA Position: 159826934; note = Sequence Name: 56322-704_101_SL_seq_12466
tggagtctgcttctctggga

SEQ ID NO: 12467 - DNA, 20 bp, Homo sapiens
  source 1..20: mol_type = genomic DNA; note = Gene: SLAMF8; note = Location (start to end; relative to TSS): SLAMF8_77_107; note = Orientation (relative to transcription): sense; note = sgRNA Position: 159826976; note = Sequence Name: 56322-704_101_SL_seq_12467
gcctgtcctcggagagctga

SEQ ID NO: 12468 - DNA, 20 bp, Homo sapiens
  source 1..20: mol_type = genomic DNA; note = Gene: SLAMF8; note = Location (start to end; relative to TSS): SLAMF8_31_61; note = Orientation (relative to transcription): sense; note = sgRNA Position: 159826930; note = Sequence Name: 56322-704_101_SL_seq_12468
cctgtggagtctgcttctct

SEQ ID NO: 12469 - DNA, 20 bp, Homo sapiens
  source 1..20: mol_type = genomic DNA; note = Gene: SLAMF8; note = Location (start to end; relative to TSS): SLAMF8_66_96; note = Orientation (relative to transcription): sense; note = sgRNA Position: 159826965; note = Sequence Name: 56322-704_101_SL_seq_12469
gcaggcagatagcctgtcct

SEQ ID NO: 12470 - DNA, 20 bp, Homo sapiens
  source 1..20: mol_type = genomic DNA; note = Gene: SLAMF9; note = Location (start to end; relative to TSS): SLAMF9_59_89; note = Orientation (relative to transcription): sense; note = sgRNA Position: 159954154; note = Sequence Name: 56322-704_101_SL_seq_12470
tgaatcacacctctggggct

SEQ ID NO: 12471 - DNA, 20 bp, Homo sapiens
  source 1..20: mol_type = genomic DNA; note = Gene: SLAMF9; note = Location (start to end; relative to TSS): SLAMF9_115_145; note = Orientation (relative to transcription): sense; note = sgRNA Position: 159954098; note = Sequence Name: 56322-704_101_SL_seq_12471
tcttctcctgctgctccagg

SEQ ID NO: 12472 - DNA, 20 bp, Homo sapiens
  source 1..20: mol_type = genomic DNA; note = Gene: SLAMF9; note = Location (start to end; relative to TSS): SLAMF9_51_81; note = Orientation (relative to transcription): antisense; note = sgRNA Position: 159954182; note = Sequence Name: 56322-704_101_SL_seq_12472
gattcagtcagtcagtcccc

SEQ ID NO: 12473 - DNA, 20 bp, Homo sapiens
  source 1..20: mol_type = genomic DNA; note = Gene: SLAMF9; note = Location (start to end; relative to TSS): SLAMF9_113_143; note = Orientation (relative to transcription): antisense; note = sgRNA Position: 159954120; note = Sequence Name: 56322-704_101_SL_seq_12473
agcaggagaagaagcagcca

SEQ ID NO: 12474 - DNA, 20 bp, Homo sapiens
  source 1..20: mol_type = genomic DNA; note = Gene: SLAMF9; note = Location (start to end; relative to TSS): SLAMF9_52_82; note = Orientation (relative to transcription): sense; note = sgRNA Position: 159954161; note = Sequence Name: 56322-704_101_SL_seq_12474
gactgactgaatcacacctc

SEQ ID NO: 12475 - DNA, 20 bp, Homo sapiens
  source 1..20: mol_type = genomic DNA; note = Gene: SLAMF9; note = Location (start to end; relative to TSS): SLAMF9_112_142; note = Orientation (relative to transcription): sense; note = sgRNA Position: 159954101; note = Sequence Name: 56322-704_101_SL_seq_12475
gcttcttctcctgctgctcc

SEQ ID NO: 12476 - DNA, 20 bp, Homo sapiens
  source 1..20: mol_type = genomic DNA; note = Gene: SLAMF9; note = Location (start to end; relative to TSS): SLAMF9_53_83; note = Orientation (relative to transcription): sense; note = sgRNA Position: 159954160; note = Sequence Name: 56322-704_101_SL_seq_12476
actgactgaatcacacctct

SEQ ID NO: 12477 - DNA, 20 bp, Homo sapiens
  source 1..20: mol_type = genomic DNA; note = Gene: SLAMF9; note = Location (start to end; relative to TSS): SLAMF9_108_138; note = Orientation (relative to transcription): antisense; note = sgRNA Position: 159954125; note = Sequence Name: 56322-704_101_SL_seq_12477
gagaagaagcagccaaggaa

SEQ ID NO: 12478 - DNA, 20 bp, Homo sapiens
  source 1..20: mol_type = genomic DNA; note = Gene: SLAMF9; note = Location (start to end; relative to TSS): SLAMF9_54_84; note = Orientation (relative to transcription): sense; note = sgRNA Position: 159954159; note = Sequence Name: 56322-704_101_SL_seq_12478
ctgactgaatcacacctctg

SEQ ID NO: 12479 - DNA, 20 bp, Homo sapiens
  source 1..20: mol_type = genomic DNA; note = Gene: SLAMF9; note = Location (start to end; relative to TSS): SLAMF9_87_117; note = Orientation (relative to transcription): sense; note = sgRNA Position: 159954126; note = Sequence Name: 56322-704_101_SL_seq_12479
ctgacatgtgtgcctttcct

SEQ ID NO: 12480 - DNA, 20 bp, Homo sapiens
  source 1..20: mol_type = genomic DNA; note = Gene: SPEG; note = Location (start to end; relative to TSS): SPEG_45_75; note = Orientation (relative to transcription): antisense; note = sgRNA Position: 219434894; note = Sequence Name: 56322-704_101_SL_seq_12480
ccctaggagacaagtctggg

SEQ ID NO: 12481 - DNA, 20 bp, Homo sapiens
  source 1..20: mol_type = genomic DNA; note = Gene: SPEG; note = Location (start to end; relative to TSS): SPEG_85_115; note = Orientation (relative to transcription): antisense; note = sgRNA Position: 219434934; note = Sequence Name: 56322-704_101_SL_seq_12481
gccggaactgggcggccacg

SEQ ID NO: 12482 - DNA, 20 bp, Homo sapiens
  source 1..20: mol_type = genomic DNA; note = Gene: SPEG; note = Location (start to end; relative to TSS): SPEG_41_71; note = Orientation (relative to transcription): antisense; note = sgRNA Position: 219434890; note = Sequence Name: 56322-704_101_SL_seq_12482
aggagacaagtctggggggc

SEQ ID NO: 12483 - DNA, 20 bp, Homo sapiens
  source 1..20: mol_type = genomic DNA; note = Gene: SPEG; note = Location (start to end; relative to TSS): SPEG_84_114; note = Orientation (relative to transcription): antisense; note = sgRNA Position: 219434933; note = Sequence Name: 56322-704_101_SL_seq_12483
ccggaactgggcggccacgg

SEQ ID NO: 12484 - DNA, 20 bp, Homo sapiens
  source 1..20: mol_type = genomic DNA; note = Gene: SPEG; note = Location (start to end; relative to TSS): SPEG_35_65; note = Orientation (relative to transcription): sense; note = sgRNA Position: 219434904; note = Sequence Name: 56322-704_101_SL_seq_12484
gccccccagacttgtctcct

SEQ ID NO: 12485 - DNA, 20 bp, Homo sapiens
  source 1..20: mol_type = genomic DNA; note = Gene: SPEG; note = Location (start to end; relative to TSS): SPEG_75_105; note = Orientation (relative to transcription): antisense; note = sgRNA Position: 219434924; note = Sequence Name: 56322-704_101_SL_seq_12485
ggcggccacgggggcacccg

SEQ ID NO: 12486 - DNA, 20 bp, Homo sapiens
  source 1..20: mol_type = genomic DNA; note = Gene: SPEG; note = Location (start to end; relative to TSS): SPEG_36_66; note = Orientation (relative to transcription): sense; note = sgRNA Position: 219434905; note = Sequence Name: 56322-704_101_SL_seq_12486
ccccccagacttgtctccta

SEQ ID NO: 12487 - DNA, 20 bp, Homo sapiens
  source 1..20: mol_type = genomic DNA; note = Gene: SPEG; note = Location (start to end; relative to TSS): SPEG_74_104; note = Orientation (relative to transcription): antisense; note = sgRNA Position: 219434923; note = Sequence Name: 56322-704_101_SL_seq_12487
gcggccacgggggcacccgc

SEQ ID NO: 12488 - DNA, 20 bp, Homo sapiens
  source 1..20: mol_type = genomic DNA; note = Gene: SPEG; note = Location (start to end; relative to TSS): SPEG_38_68; note = Orientation (relative to transcription): antisense; note = sgRNA Position: 219434887; note = Sequence Name: 56322-704_101_SL_seq_12488
agacaagtctggggggccgg

SEQ ID NO: 12489 - DNA, 20 bp, Homo sapiens
  source 1..20: mol_type = genomic DNA; note = Gene: SPEG; note = Location (start to end; relative to TSS): SPEG_70_100; note = Orientation (relative to transcription): antisense; note = sgRNA Position: 219434919; note = Sequence Name: 56322-704_101_SL_seq_12489
ccacgggggcacccgcggga

SEQ ID NO: 12490 - DNA, 20 bp, Homo sapiens
  source 1..20: mol_type = genomic DNA; note = Gene: TAPBP; note = Location (start to end; relative to TSS): TAPBP_58_88; note = Orientation (relative to transcription): antisense; note = sgRNA Position: 33314016; note = Sequence Name: 56322-704_101_SL_seq_12490
gctcacccaaagccacagcg

SEQ ID NO: 12491 - DNA, 20 bp, Homo sapiens
  source 1..20: mol_type = genomic DNA; note = Gene: TAPBP; note = Location (start to end; relative to TSS): TAPBP_89_119; note = Orientation (relative to transcription): sense; note = sgRNA Position: 33313965; note = Sequence Name: 56322-704_101_SL_seq_12491
gcccaagaactagagggaag

SEQ ID NO: 12492 - DNA, 20 bp, Homo sapiens
  source 1..20: mol_type = genomic DNA; note = Gene: TAPBP; note = Location (start to end; relative to TSS): TAPBP_37_67; note = Orientation (relative to transcription): sense; note = sgRNA Position: 33314017; note = Sequence Name: 56322-704_101_SL_seq_12492
cctgtctctgctcctcgctg

SEQ ID NO: 12493 - DNA, 20 bp, Homo sapiens
  source 1..20: mol_type = genomic DNA; note = Gene: TAPBP; note = Location (start to end; relative to TSS): TAPBP_83_113; note = Orientation (relative to transcription): sense; note = sgRNA Position: 33313971; note = Sequence Name: 56322-704_101_SL_seq_12493
ctcatcgcccaagaactaga

SEQ ID NO: 12494 - DNA, 20 bp, Homo sapiens
  source 1..20: mol_type = genomic DNA; note = Gene: TAPBP; note = Location (start to end; relative to TSS): TAPBP_-4_26; note = Orientation (relative to transcription): sense; note = sgRNA Position: 33314058; note = Sequence Name: 56322-704_101_SL_seq_12494
aggaggcttcatggctgagg

SEQ ID NO: 12495 - DNA, 20 bp, Homo sapiens
  source 1..20: mol_type = genomic DNA; note = Gene: TAPBP; note = Location (start to end; relative to TSS): TAPBP_82_112; note = Orientation (relative to transcription): sense; note = sgRNA Position: 33313972; note = Sequence Name: 56322-704_101_SL_seq_12495
actcatcgcccaagaactag

SEQ ID NO: 12496 - DNA, 20 bp, Homo sapiens
  source 1..20: mol_type = genomic DNA; note = Gene: TAPBP; note = Location (start to end; relative to TSS): TAPBP_-7_23; note = Orientation (relative to transcription): sense; note = sgRNA Position: 33314061; note = Sequence Name: 56322-704_101_SL_seq_12496
aagaggaggcttcatggctg

SEQ ID NO: 12497 - DNA, 20 bp, Homo sapiens
  source 1..20: mol_type = genomic DNA; note = Gene: TAPBP; note = Location (start to end; relative to TSS): TAPBP_58_88; note = Orientation (relative to transcription): antisense; note = sgRNA Position: 33314016; note = Sequence Name: 56322-704_101_SL_seq_12497
gctcacccaaagccacagcg

SEQ ID NO: 12498 - DNA, 20 bp, Homo sapiens
  source 1..20: mol_type = genomic DNA; note = Gene: TAPBP; note = Location (start to end; relative to TSS): TAPBP_-13_17; note = Orientation (relative to transcription): sense; note = sgRNA Position: 33314067; note = Sequence Name: 56322-704_101_SL_seq_12498
aggaggaagaggaggcttca

SEQ ID NO: 12499 - DNA, 20 bp, Homo sapiens
  source 1..20: mol_type = genomic DNA; note = Gene: TAPBP; note = Location (start to end; relative to TSS): TAPBP_37_67; note = Orientation (relative to transcription): sense; note = sgRNA Position: 33314017; note = Sequence Name: 56322-704_101_SL_seq_12499
cctgtctctgctcctcgctg

SEQ ID NO: 12500 - DNA, 20 bp, Homo sapiens
  source 1..20: mol_type = genomic DNA; note = Gene: TAPBPL; note = Location (start to end; relative to TSS): TAPBPL_63_93; note = Orientation (relative to transcription): sense; note = sgRNA Position: 6452131; note = Sequence Name: 56322-704_101_SL_seq_12500
ggaacagggaagaaacctaa

SEQ ID NO: 12501 - DNA, 20 bp, Homo sapiens
  source 1..20: mol_type = genomic DNA; note = Gene: TAPBPL; note = Location (start to end; relative to TSS): TAPBPL_108_138; note = Orientation (relative to transcription): sense; note = sgRNA Position: 6452176; note = Sequence Name: 56322-704_101_SL_seq_12501
ggagagcccccttcttccgc

SEQ ID NO: 12502 - DNA, 20 bp, Homo sapiens
  source 1..20: mol_type = genomic DNA; note = Gene: TAPBPL; note = Location (start to end; relative to TSS): TAPBPL_70_100; note = Orientation (relative to transcription): sense; note = sgRNA Position: 6452138; note = Sequence Name: 56322-704_101_SL_seq_12502
ggaagaaacctaaaggctgc

SEQ ID NO: 12503 - DNA, 20 bp, Homo sapiens
  source 1..20: mol_type = genomic DNA; note = Gene: TAPBPL; note = Location (start to end; relative to TSS): TAPBPL_105_135; note = Orientation (relative to transcription): antisense; note = sgRNA Position: 6452153; note = Sequence Name: 56322-704_101_SL_seq_12503
gggggctctccaagcacacc

SEQ ID NO: 12504 - DNA, 20 bp, Homo sapiens
  source 1..20: mol_type = genomic DNA; note = Gene: TAPBPL; note = Location (start to end; relative to TSS): TAPBPL_41_71; note = Orientation (relative to transcription): sense; note = sgRNA Position: 6452109; note = Sequence Name: 56322-704_101_SL_seq_12504
gaaagaaaagtcggcagcag

SEQ ID NO: 12505 - DNA, 20 bp, Homo sapiens
  source 1..20: mol_type = genomic DNA; note = Gene: TAPBPL; note = Location (start to end; relative to TSS): TAPBPL_78_108; note = Orientation (relative to transcription): sense; note = sgRNA Position: 6452146; note = Sequence Name: 56322-704_101_SL_seq_12505
cctaaaggctgcaggctgcc

SEQ ID NO: 12506 - DNA, 20 bp, Homo sapiens
  source 1..20: mol_type = genomic DNA; note = Gene: TAPBPL; note = Location (start to end; relative to TSS): TAPBPL_32_62; note = Orientation (relative to transcription): sense; note = sgRNA Position: 6452100; note = Sequence Name: 56322-704_101_SL_seq_12506
agtgaaagtgaaagaaaagt

SEQ ID NO: 12507 - DNA, 20 bp, Homo sapiens
  source 1..20: mol_type = genomic DNA; note = Gene: TAPBPL; note = Location (start to end; relative to TSS): TAPBPL_70_100; note = Orientation (relative to transcription): sense; note = sgRNA Position: 6452138; note = Sequence Name: 56322-704_101_SL_seq_12507
ggaagaaacctaaaggctgc

SEQ ID NO: 12508 - DNA, 20 bp, Homo sapiens
  source 1..20: mol_type = genomic DNA; note = Gene: TAPBPL; note = Location (start to end; relative to TSS): TAPBPL_28_58; note = Orientation (relative to transcription): antisense; note = sgRNA Position: 6452076; note = Sequence Name: 56322-704_101_SL_seq_12508
cactttcacttagagcaaga

SEQ ID NO: 12509 - DNA, 20 bp, Homo sapiens
  source 1..20: mol_type = genomic DNA; note = Gene: TAPBPL; note = Location (start to end; relative to TSS): TAPBPL_63_93; note = Orientation (relative to transcription): sense; note = sgRNA Position: 6452131; note = Sequence Name: 56322-704_101_SL_seq_12509
ggaacagggaagaaacctaa

SEQ ID NO: 12510 - DNA, 20 bp, Homo sapiens
  source 1..20: mol_type = genomic DNA; note = Gene: TARM1; note = Location (start to end; relative to TSS): TARM1_49_79; note = Orientation (relative to transcription): antisense; note = sgRNA Position: 54081312; note = Sequence Name: 56322-704_101_SL_seq_12510
tgtgagacttactgaaacag

SEQ ID NO: 12511 - DNA, 20 bp, Homo sapiens
  source 1..20: mol_type = genomic DNA; note = Gene: TARM1; note = Location (start to end; relative to TSS): TARM1_81_111; note = Orientation (relative to transcription): sense; note = sgRNA Position: 54081260; note = Sequence Name: 56322-704_101_SL_seq_12511
gcagaaaatcatggaactgg

SEQ ID NO: 12512 - DNA, 20 bp, Homo sapiens
  source 1..20: mol_type = genomic DNA; note = Gene: TARM1; note = Location (start to end; relative to TSS): TARM1_43_73; note = Orientation (relative to transcription): sense; note = sgRNA Position: 54081298; note = Sequence Name: 56322-704_101_SL_seq_12512
ctgtttcagtaagtctcaca

SEQ ID NO: 12513 - DNA, 20 bp, Homo sapiens
  source 1..20: mol_type = genomic DNA; note = Gene: TARM1; note = Location (start to end; relative to TSS): TARM1_79_109; note = Orientation (relative to transcription): antisense; note = sgRNA Position: 54081282; note = Sequence Name: 56322-704_101_SL_seq_12513
atgattttctgcagtcccag

SEQ ID NO: 12514 - DNA, 20 bp, Homo sapiens
  source 1..20: mol_type = genomic DNA; note = Gene: TARM1; note = Location (start to end; relative to TSS): TARM1_31_61; note = Orientation (relative to transcription): antisense; note = sgRNA Position: 54081330; note = Sequence Name: 56322-704_101_SL_seq_12514
agaggagggaaagcagctta

SEQ ID NO: 12515 - DNA, 20 bp, Homo sapiens
  source 1..20: mol_type = genomic DNA; note = Gene: TARM1; note = Location (start to end; relative to TSS): TARM1_78_108; note = Orientation (relative to transcription): sense; note = sgRNA Position: 54081263; note = Sequence Name: 56322-704_101_SL_seq_12515
actgcagaaaatcatggaac

SEQ ID NO: 12516 - DNA, 20 bp, Homo sapiens
  source 1..20: mol_type = genomic DNA; note = Gene: TARM1; note = Location (start to end; relative to TSS): TARM1_42_72; note = Orientation (relative to transcription): sense; note = sgRNA Position: 54081299; note = Sequence Name: 56322-704_101_SL_seq_12516
tctgtttcagtaagtctcac

SEQ ID NO: 12517 - DNA, 20 bp, Homo sapiens
  source 1..20: mol_type = genomic DNA; note = Gene: TARM1; note = Location (start to end; relative to TSS): TARM1_72_102; note = Orientation (relative to transcription): sense; note = sgRNA Position: 54081269; note = Sequence Name: 56322-704_101_SL_seq_12517
actgggactgcagaaaatca

SEQ ID NO: 12518 - DNA, 20 bp, Homo sapiens
  source 1..20: mol_type = genomic DNA; note = Gene: TARM1; note = Location (start to end; relative to TSS): TARM1_21_51; note = Orientation (relative to transcription): antisense; note = sgRNA Position: 54081340; note = Sequence Name: 56322-704_101_SL_seq_12518
aagcagcttagggatcatga

SEQ ID NO: 12519 - DNA, 20 bp, Homo sapiens
  source 1..20: mol_type = genomic DNA; note = Gene: TARM1; note = Location (start to end; relative to TSS): TARM1_54_84; note = Orientation (relative to transcription): sense; note = sgRNA Position: 54081287; note = Sequence Name: 56322-704_101_SL_seq_12519
agtctcacagggctatccac

SEQ ID NO: 12520 - DNA, 20 bp, Homo sapiens
  source 1..20: mol_type = genomic DNA; note = Gene: TEK; note = Location (start to end; relative to TSS): TEK_46_76; note = Orientation (relative to transcription): sense; note = sgRNA Position: 27109297; note = Sequence Name: 56322-704_101_SL_seq_12520
tgttttgatgaattgcgaga

SEQ ID NO: 12521 - DNA, 20 bp, Homo sapiens
  source 1..20: mol_type = genomic DNA; note = Gene: TEK; note = Location (start to end; relative to TSS): TEK_94_124; note = Orientation (relative to transcription): antisense; note = sgRNA Position: 27109325; note = Sequence Name: 56322-704_101_SL_seq_12521
catttggtatcagcagggct

SEQ ID NO: 12522 - DNA, 20 bp, Homo sapiens
  source 1..20: mol_type = genomic DNA; note = Gene: TEK; note = Location (start to end; relative to TSS): TEK_51_81; note = Orientation (relative to transcription): sense; note = sgRNA Position: 27109302; note = Sequence Name: 56322-704_101_SL_seq_12522
tgatgaattgcgagatggat

SEQ ID NO: 12523 - DNA, 20 bp, Homo sapiens
  source 1..20: mol_type = genomic DNA; note = Gene: TEK; note = Location (start to end; relative to TSS): TEK_93_123; note = Orientation (relative to transcription): antisense; note = sgRNA Position: 27109324; note = Sequence Name: 56322-704_101_SL_seq_12523
atttggtatcagcagggctg

SEQ ID NO: 12524 - DNA, 20 bp, Homo sapiens
  source 1..20: mol_type = genomic DNA; note = Gene: TEK; note = Location (start to end; relative to TSS): TEK_52_82; note = Orientation (relative to transcription): sense; note = sgRNA Position: 27109303; note = Sequence Name: 56322-704_101_SL_seq_12524
gatgaattgcgagatggata

SEQ ID NO: 12525 - DNA, 20 bp, Homo sapiens
  source 1..20: mol_type = genomic DNA; note = Gene: TEK; note = Location (start to end; relative to TSS): TEK_92_122; note = Orientation (relative to transcription): antisense; note = sgRNA Position: 27109323; note = Sequence Name: 56322-704_101_SL_seq_12525
tttggtatcagcagggctgg

SEQ ID NO: 12526 - DNA, 20 bp, Homo sapiens
  source 1..20: mol_type = genomic DNA; note = Gene: TEK; note = Location (start to end; relative to TSS): TEK_5_35; note = Orientation (relative to transcription): antisense; note = sgRNA Position: 27109236; note = Sequence Name: 56322-704_101_SL_seq_12526
tgcttttgctgctgctgtag

SEQ ID NO: 12527 - DNA, 20 bp, Homo sapiens
  source 1..20: mol_type = genomic DNA; note = Gene: TEK; note = Location (start to end; relative to TSS): TEK_51_81; note = Orientation (relative to transcription): sense; note = sgRNA Position: 27109302; note = Sequence Name: 56322-704_101_SL_seq_12527
tgatgaattgcgagatggat

SEQ ID NO: 12528 - DNA, 20 bp, Homo sapiens
  source 1..20: mol_type = genomic DNA; note = Gene: TEK; note = Location (start to end; relative to TSS): TEK_-1_29; note = Orientation (relative to transcription): antisense; note = sgRNA Position: 27109230; note = Sequence Name: 56322-704_101_SL_seq_12528
tgctgctgctgtaggggcag

SEQ ID NO: 12529 - DNA, 20 bp, Homo sapiens
  source 1..20: mol_type = genomic DNA; note = Gene: TEK; note = Location (start to end; relative to TSS): TEK_46_76; note = Orientation (relative to transcription): sense; note = sgRNA Position: 27109297; note = Sequence Name: 56322-704_101_SL_seq_12529
tgttttgatgaattgcgaga

SEQ ID NO: 12530 - DNA, 20 bp, Homo sapiens
  source 1..20: mol_type = genomic DNA; note = Gene: THY1; note = Location (start to end; relative to TSS): THY1_49_79; note = Orientation (relative to transcription): sense; note = sgRNA Position: 119423099; note = Sequence Name: 56322-704_101_SL_seq_12530
caggtgggaactggagccgg

SEQ ID NO: 12531 - DNA, 20 bp, Homo sapiens
  source 1..20: mol_type = genomic DNA; note = Gene: THY1; note = Location (start to end; relative to TSS): THY1_98_128; note = Orientation (relative to transcription): antisense; note = sgRNA Position: 119423070; note = Sequence Name: 56322-704_101_SL_seq_12531
cttgcatgggcgcctgacgg

SEQ ID NO: 12532 - DNA, 20 bp, Homo sapiens
  source 1..20: mol_type = genomic DNA; note = Gene: THY1; note = Location (start to end; relative to TSS): THY1_50_80; note = Orientation (relative to transcription): sense; note = sgRNA Position: 119423098; note = Sequence Name: 56322-704_101_SL_seq_12532
aggtgggaactggagccggt

SEQ ID NO: 12533 - DNA, 20 bp, Homo sapiens
  source 1..20: mol_type = genomic DNA; note = Gene: THY1; note = Location (start to end; relative to TSS): THY1_83_113; note = Orientation (relative to transcription): antisense; note = sgRNA Position: 119423085; note = Sequence Name: 56322-704_101_SL_seq_12533
gacggcggtccccgagcccc

SEQ ID NO: 12534 - DNA, 20 bp, Homo sapiens
  source 1..20: mol_type = genomic DNA; note = Gene: THY1; note = Location (start to end; relative to TSS): THY1_46_76; note = Orientation (relative to transcription): sense; note = sgRNA Position: 119423102; note = Sequence Name: 56322-704_101_SL_seq_12534
gtccaggtgggaactggagc

SEQ ID NO: 12535 - DNA, 20 bp, Homo sapiens
  source 1..20: mol_type = genomic DNA; note = Gene: THY1; note = Location (start to end; relative to TSS): THY1_77_107; note = Orientation (relative to transcription): sense; note = sgRNA Position: 119423071; note = Sequence Name: 56322-704_101_SL_seq_12535
ggggctcggggaccgccgtc

SEQ ID NO: 12536 - DNA, 20 bp, Homo sapiens
  source 1..20: mol_type = genomic DNA; note = Gene: THY1; note = Location (start to end; relative to TSS): THY1_40_70; note = Orientation (relative to transcription): sense; note = sgRNA Position: 119423108; note = Sequence Name: 56322-704_101_SL_seq_12536
accccagtccaggtgggaac

SEQ ID NO: 12537 - DNA, 20 bp, Homo sapiens
  source 1..20: mol_type = genomic DNA; note = Gene: THY1; note = Location (start to end; relative to TSS): THY1_74_104; note = Orientation (relative to transcription): antisense; note = sgRNA Position: 119423094; note = Sequence Name: 56322-704_101_SL_seq_12537
ccccgagccccaggtcccac

SEQ ID NO: 12538 - DNA, 20 bp, Homo sapiens
  source 1..20: mol_type = genomic DNA; note = Gene: THY1; note = Location (start to end; relative to TSS): THY1_14_44; note = Orientation (relative to transcription): sense; note = sgRNA Position: 119423134; note = Sequence Name: 56322-704_101_SL_seq_12538
tctggaggaggctgcagcag

SEQ ID NO: 12539 - DNA, 20 bp, Homo sapiens
  source 1..20: mol_type = genomic DNA; note = Gene: THY1; note = Location (start to end; relative to TSS): THY1_46_76; note = Orientation (relative to transcription): sense; note = sgRNA Position: 119423102; note = Sequence Name: 56322-704_101_SL_seq_12539
gtccaggtgggaactggagc

SEQ ID NO: 12540 - DNA, 20 bp, Homo sapiens
  source 1..20: mol_type = genomic DNA; note = Gene: TIE1; note = Location (start to end; relative to TSS): TIE1_44_74; note = Orientation (relative to transcription): antisense; note = sgRNA Position: 43301032; note = Sequence Name: 56322-704_101_SL_seq_12540
gccaggacgagctgggcctg

SEQ ID NO: 12541 - DNA, 20 bp, Homo sapiens
  source 1..20: mol_type = genomic DNA; note = Gene: TIE1; note = Location (start to end; relative to TSS): TIE1_80_110; note = Orientation (relative to transcription): antisense; note = sgRNA Position: 43301068; note = Sequence Name: 56322-704_101_SL_seq_12541
cccgccagaccatactccag

SEQ ID NO: 12542 - DNA, 20 bp, Homo sapiens
  source 1..20: mol_type = genomic DNA; note = Gene: TIE1; note = Location (start to end; relative to TSS): TIE1_38_68; note = Orientation (relative to transcription): sense; note = sgRNA Position: 43301046; note = Sequence Name: 56322-704_101_SL_seq_12542
caggcccagctcgtcctggc

SEQ ID NO: 12543 - DNA, 20 bp, Homo sapiens
  source 1..20: mol_type = genomic DNA; note = Gene: TIE1; note = Location (start to end; relative to TSS): TIE1_70_100; note = Orientation (relative to transcription): sense; note = sgRNA Position: 43301078; note = Sequence Name: 56322-704_101_SL_seq_12543
gcctctggagtatggtctgg

SEQ ID NO: 12544 - DNA, 20 bp, Homo sapiens
  source 1..20: mol_type = genomic DNA; note = Gene: TIE1; note = Location (start to end; relative to TSS): TIE1_34_64; note = Orientation (relative to transcription): sense; note = sgRNA Position: 43301042; note = Sequence Name: 56322-704_101_SL_seq_12544
accccaggcccagctcgtcc

SEQ ID NO: 12545 - DNA, 20 bp, Homo sapiens
  source 1..20: mol_type = genomic DNA; note = Gene: TIE1; note = Location (start to end; relative to TSS): TIE1_67_97; note = Orientation (relative to transcription): sense; note = sgRNA Position: 43301075; note = Sequence Name: 56322-704_101_SL_seq_12545
tcggcctctggagtatggtc

SEQ ID NO: 12546 - DNA, 20 bp, Homo sapiens
  source 1..20: mol_type = genomic DNA; note = Gene: TIE1; note = Location (start to end; relative to TSS): TIE1_31_61; note = Orientation (relative to transcription): antisense; note = sgRNA Position: 43301019; note = Sequence Name: 56322-704_101_SL_seq_12546
gggcctggggtcagatgctg

SEQ ID NO: 12547 - DNA, 20 bp, Homo sapiens
  source 1..20: mol_type = genomic DNA; note = Gene: TIE1; note = Location (start to end; relative to TSS): TIE1_61_91; note = Orientation (relative to transcription): antisense; note = sgRNA Position: 43301049; note = Sequence Name: 56322-704_101_SL_seq_12547
gaggccgacccaggccagcc

SEQ ID NO: 12548 - DNA, 20 bp, Homo sapiens
  source 1..20: mol_type = genomic DNA; note = Gene: TIE1; note = Location (start to end; relative to TSS): TIE1_19_49; note = Orientation (relative to transcription): sense; note = sgRNA Position: 43301027; note = Sequence Name: 56322-704_101_SL_seq_12548
ggcccacagcatctgacccc

SEQ ID NO: 12549 - DNA, 20 bp, Homo sapiens
  source 1..20: mol_type = genomic DNA; note = Gene: TIE1; note = Location (start to end; relative to TSS): TIE1_51_81; note = Orientation (relative to transcription): antisense; note = sgRNA Position: 43301039; note = Sequence Name: 56322-704_101_SL_seq_12549
caggccagccaggacgagct

SEQ ID NO: 12550 - DNA, 20 bp, Homo sapiens
  source 1..20: mol_type = genomic DNA; note = Gene: TIGIT; note = Location (start to end; relative to TSS): TIGIT_44_74; note = Orientation (relative to transcription): sense; note = sgRNA Position: 114294098; note = Sequence Name: 56322-704_101_SL_seq_12550
tgatctgggcccaggggctg

SEQ ID NO: 12551 - DNA, 20 bp, Homo sapiens
  source 1..20: mol_type = genomic DNA; note = Gene: TIGIT; note = Location (start to end; relative to TSS): TIGIT_83_113; note = Orientation (relative to transcription): antisense; note = sgRNA Position: 114294117; note = Sequence Name: 56322-704_101_SL_seq_12551
tcaggccttacctgaggcga

SEQ ID NO: 12552 - DNA, 20 bp, Homo sapiens
  source 1..20: mol_type = genomic DNA; note = Gene: TIGIT; note = Location (start to end; relative to TSS): TIGIT_37_67; note = Orientation (relative to transcription): sense; note = sgRNA Position: 114294091; note = Sequence Name: 56322-704_101_SL_seq_12552
ctcctcctgatctgggccca

SEQ ID NO: 12553 - DNA, 20 bp, Homo sapiens
  source 1..20: mol_type = genomic DNA; note = Gene: TIGIT; note = Location (start to end; relative to TSS): TIGIT_82_112; note = Orientation (relative to transcription): antisense; note = sgRNA Position: 114294116; note = Sequence Name: 56322-704_101_SL_seq_12553
caggccttacctgaggcgag

SEQ ID NO: 12554 - DNA, 20 bp, Homo sapiens
  source 1..20: mol_type = genomic DNA; note = Gene: TIGIT; note = Location (start to end; relative to TSS): TIGIT_38_68; note = Orientation (relative to transcription): sense; note = sgRNA Position: 114294092; note = Sequence Name: 56322-704_101_SL_seq_12554
tcctcctgatctgggcccag

SEQ ID NO: 12555 - DNA, 20 bp, Homo sapiens
  source 1..20: mol_type = genomic DNA; note = Gene: TIGIT; note = Location (start to end; relative to TSS): TIGIT_69_99; note = Orientation (relative to transcription): sense; note = sgRNA Position: 114294123; note = Sequence Name: 56322-704_101_SL_seq_12555
ggctcccctcgcctcaggta

SEQ ID NO: 12556 - DNA, 20 bp, Homo sapiens
  source 1..20: mol_type = genomic DNA; note = Gene: TIGIT; note = Location (start to end; relative to TSS): TIGIT_30_60; note = Orientation (relative to transcription): sense; note = sgRNA Position: 114294084; note = Sequence Name: 56322-704_101_SL_seq_12556
ctggtgtctcctcctgatct

SEQ ID NO: 12557 - DNA, 20 bp, Homo sapiens
  source 1..20: mol_type = genomic DNA; note = Gene: TIGIT; note = Location (start to end; relative to TSS): TIGIT_62_92; note = Orientation (relative to transcription): antisense; note = sgRNA Position: 114294096; note = Sequence Name: 56322-704_101_SL_seq_12557
gggagcctgcctcagcccct

SEQ ID NO: 12558 - DNA, 20 bp, Homo sapiens
  source 1..20: mol_type = genomic DNA; note = Gene: TIGIT; note = Location (start to end; relative to TSS): TIGIT_19_49; note = Orientation (relative to transcription): antisense; note = sgRNA Position: 114294053; note = Sequence Name: 56322-704_101_SL_seq_12558
cagcgcatgcttctgcccag

SEQ ID NO: 12559 - DNA, 20 bp, Homo sapiens
  source 1..20: mol_type = genomic DNA; note = Gene: TIGIT; note = Location (start to end; relative to TSS): TIGIT_51_81; note = Orientation (relative to transcription): antisense; note = sgRNA Position: 114294085; note = Sequence Name: 56322-704_101_SL_seq_12559
tcagcccctgggcccagatc

SEQ ID NO: 12560 - DNA, 20 bp, Homo sapiens
  source 1..20: mol_type = genomic DNA; note = Gene: TIMD4; note = Location (start to end; relative to TSS): TIMD4_42_72; note = Orientation (relative to transcription): sense; note = sgRNA Position: 156963160; note = Sequence Name: 56322-704_101_SL_seq_12560
tctggctgatgattgagttt

SEQ ID NO: 12561 - DNA, 20 bp, Homo sapiens
  source 1..20: mol_type = genomic DNA; note = Gene: TIMD4; note = Location (start to end; relative to TSS): TIMD4_114_144; note = Orientation (relative to transcription): sense; note = sgRNA Position: 156963088; note = Sequence Name: 56322-704_101_SL_seq_12561
gaggacttgctattgtgtga

SEQ ID NO: 12562 - DNA, 20 bp, Homo sapiens
  source 1..20: mol_type = genomic DNA; note = Gene: TIMD4; note = Location (start to end; relative to TSS): TIMD4_24_54; note = Orientation (relative to transcription): sense; note = sgRNA Position: 156963178; note = Sequence Name: 56322-704_101_SL_seq_12562
ccaaagaacctctcattctc

SEQ ID NO: 12563 - DNA, 20 bp, Homo sapiens
  source 1..20: mol_type = genomic DNA; note = Gene: TIMD4; note = Location (start to end; relative to TSS): TIMD4_102_132; note = Orientation (relative to transcription): antisense; note = sgRNA Position: 156963120; note = Sequence Name: 56322-704_101_SL_seq_12563
tctggaaacttctacataga

SEQ ID NO: 12564 - DNA, 20 bp, Homo sapiens
  source 1..20: mol_type = genomic DNA; note = Gene: TIMD4; note = Location (start to end; relative to TSS): TIMD4_21_51; note = Orientation (relative to transcription): antisense; note = sgRNA Position: 156963201; note = Sequence Name: 56322-704_101_SL_seq_12564
aggttctttggacattttga

SEQ ID NO: 12565 - DNA, 20 bp, Homo sapiens
  source 1..20: mol_type = genomic DNA; note = Gene: TIMD4; note = Location (start to end; relative to TSS): TIMD4_95_125; note = Orientation (relative to transcription): sense; note = sgRNA Position: 156963107; note = Sequence Name: 56322-704_101_SL_seq_12565
ttctatgtagaagtttccag

SEQ ID NO: 12566 - DNA, 20 bp, Homo sapiens
  source 1..20: mol_type = genomic DNA; note = Gene: TIMD4; note = Location (start to end; relative to TSS): TIMD4_45_75; note = Orientation (relative to transcription): sense; note = sgRNA Position: 156963157; note = Sequence Name: 56322-704_101_SL_seq_12566
ggctgatgattgagttttgg

SEQ ID NO: 12567 - DNA, 20 bp, Homo sapiens
  source 1..20: mol_type = genomic DNA; note = Gene: TIMD4; note = Location (start to end; relative to TSS): TIMD4_82_112; note = Orientation (relative to transcription): antisense; note = sgRNA Position: 156963140; note = Sequence Name: 56322-704_101_SL_seq_12567
aggtttcagaacacttactc

SEQ ID NO: 12568 - DNA, 20 bp, Homo sapiens
  source 1..20: mol_type = genomic DNA; note = Gene: TIMD4; note = Location (start to end; relative to TSS): TIMD4_13_43; note = Orientation (relative to transcription): antisense; note = sgRNA Position: 156963209; note = Sequence Name: 56322-704_101_SL_seq_12568
tggacattttgacggttgac

SEQ ID NO: 12569 - DNA, 20 bp, Homo sapiens
  source 1..20: mol_type = genomic DNA; note = Gene: TIMD4; note = Location (start to end; relative to TSS): TIMD4_45_75; note = Orientation (relative to transcription): sense; note = sgRNA Position: 156963157; note = Sequence Name: 56322-704_101_SL_seq_12569
ggctgatgattgagttttgg

SEQ ID NO: 12570 - DNA, 20 bp, Homo sapiens
  source 1..20: mol_type = genomic DNA; note = Gene: TMEM25; note = Location (start to end; relative to TSS): TMEM25_31_61; note = Orientation (relative to transcription): sense; note = sgRNA Position: 118531249; note = Sequence Name: 56322-704_101_SL_seq_12570
caggtgagccgccccggtgg

SEQ ID NO: 12571 - DNA, 20 bp, Homo sapiens
  source 1..20: mol_type = genomic DNA; note = Gene: TMEM25; note = Location (start to end; relative to TSS): TMEM25_94_124; note = Orientation (relative to transcription): antisense; note = sgRNA Position: 118531292; note = Sequence Name: 56322-704_101_SL_seq_12571
gcggaagaggagagggtcgg

SEQ ID NO: 12572 - DNA, 20 bp, Homo sapiens
  source 1..20: mol_type = genomic DNA; note = Gene: TMEM25; note = Location (start to end; relative to TSS): TMEM25_28_58; note = Orientation (relative to transcription): sense; note = sgRNA Position: 118531246; note = Sequence Name: 56322-704_101_SL_seq_12572
agccaggtgagccgccccgg

SEQ ID NO: 12573 - DNA, 20 bp, Homo sapiens
  source 1..20: mol_type = genomic DNA; note = Gene: TMEM25; note = Location (start to end; relative to TSS): TMEM25_93_123; note = Orientation (relative to transcription): antisense; note = sgRNA Position: 118531291; note = Sequence Name: 56322-704_101_SL_seq_12573
cggaagaggagagggtcgga

SEQ ID NO: 12574 - DNA, 20 bp, Homo sapiens
  source 1..20: mol_type = genomic DNA; note = Gene: TMEM25; note = Location (start to end; relative to TSS): TMEM25_35_65; note = Orientation (relative to transcription): sense; note = sgRNA Position: 118531253; note = Sequence Name: 56322-704_101_SL_seq_12574
tgagccgccccggtggcggg

SEQ ID NO: 12575 - DNA, 20 bp, Homo sapiens
  source 1..20: mol_type = genomic DNA; note = Gene: TMEM25; note = Location (start to end; relative to TSS): TMEM25_90_120; note = Orientation (relative to transcription): antisense; note = sgRNA Position: 118531288; note = Sequence Name: 56322-704_101_SL_seq_12575
aagaggagagggtcggaggg

SEQ ID NO: 12576 - DNA, 20 bp, Homo sapiens
  source 1..20: mol_type = genomic DNA; note = Gene: TMEM25; note = Location (start to end; relative to TSS): TMEM25_39_69; note = Orientation (relative to transcription): antisense; note = sgRNA Position: 118531237; note = Sequence Name: 56322-704_101_SL_seq_12576
cgccaccggggcggctcacc

SEQ ID NO: 12577 - DNA, 20 bp, Homo sapiens
  source 1..20: mol_type = genomic DNA; note = Gene: TMEM25; note = Location (start to end; relative to TSS): TMEM25_89_119; note = Orientation (relative to transcription): antisense; note = sgRNA Position: 118531287; note = Sequence Name: 56322-704_101_SL_seq_12577
agaggagagggtcggagggt

SEQ ID NO: 12578 - DNA, 20 bp, Homo sapiens
  source 1..20: mol_type = genomic DNA; note = Gene: TMEM25; note = Location (start to end; relative to TSS): TMEM25_25_55; note = Orientation (relative to transcription): sense; note = sgRNA Position: 118531243; note = Sequence Name: 56322-704_101_SL_seq_12578
gggagccaggtgagccgccc

SEQ ID NO: 12579 - DNA, 20 bp, Homo sapiens
  source 1..20: mol_type = genomic DNA; note = Gene: TMEM25; note = Location (start to end; relative to TSS): TMEM25_88_118; note = Orientation (relative to transcription): antisense; note = sgRNA Position: 118531286; note = Sequence Name: 56322-704_101_SL_seq_12579
gaggagagggtcggagggtg

SEQ ID NO: 12580 - DNA, 20 bp, Homo sapiens
  source 1..20: mol_type = genomic DNA; note = Gene: TMEM81; note = Location (start to end; relative to TSS): TMEM81_74_104; note = Orientation (relative to transcription): sense; note = sgRNA Position: 205084362; note = Sequence Name: 56322-704_101_SL_seq_12580
gattcagctggaataccttg

SEQ ID NO: 12581 - DNA, 20 bp, Homo sapiens
  source 1..20: mol_type = genomic DNA; note = Gene: TMEM81; note = Location (start to end; relative to TSS): TMEM81_130_160; note = Orientation (relative to transcription): antisense; note = sgRNA Position: 205084326; note = Sequence Name: 56322-704_101_SL_seq_12581
taaaaccttcatgtctcggt

SEQ ID NO: 12582 - DNA, 20 bp, Homo sapiens
  source 1..20: mol_type = genomic DNA; note = Gene: TMEM81; note = Location (start to end; relative to TSS): TMEM81_75_105; note = Orientation (relative to transcription): sense; note = sgRNA Position: 205084361; note = Sequence Name: 56322-704_101_SL_seq_12582
attcagctggaataccttgt

SEQ ID NO: 12583 - DNA, 20 bp, Homo sapiens
  source 1..20: mol_type = genomic DNA; note = Gene: TMEM81; note = Location (start to end; relative to TSS): TMEM81_116_146; note = Orientation (relative to transcription): sense; note = sgRNA Position: 205084320; note = Sequence Name: 56322-704_101_SL_seq_12583
aaacgcctaccgagacatga

SEQ ID NO: 12584 - DNA, 20 bp, Homo sapiens
  source 1..20: mol_type = genomic DNA; note = Gene: TMEM81; note = Location (start to end; relative to TSS): TMEM81_62_92; note = Orientation (relative to transcription): sense; note = sgRNA Position: 205084374; note = Sequence Name: 56322-704_101_SL_seq_12584
tgatttatagaggattcagc

SEQ ID NO: 12585 - DNA, 20 bp, Homo sapiens
  source 1..20: mol_type = genomic DNA; note = Gene: TMEM81; note = Location (start to end; relative to TSS): TMEM81_98_128; note = Orientation (relative to transcription): antisense; note = sgRNA Position: 205084358; note = Sequence Name: 56322-704_101_SL_seq_12585
accctcagccagcacccaca

SEQ ID NO: 12586 - DNA, 20 bp, Homo sapiens
  source 1..20: mol_type = genomic DNA; note = Gene: TMEM81; note = Location (start to end; relative to TSS): TMEM81_52_82; note = Orientation (relative to transcription): sense; note = sgRNA Position: 205084384; note = Sequence Name: 56322-704_101_SL_seq_12586
aatcaagttatgatttatag

SEQ ID NO: 12587 - DNA, 20 bp, Homo sapiens
  source 1..20: mol_type = genomic DNA; note = Gene: TMEM81; note = Location (start to end; relative to TSS): TMEM81_87_117; note = Orientation (relative to transcription): sense; note = sgRNA Position: 205084349; note = Sequence Name: 56322-704_101_SL_seq_12587
taccttgtgggtgctggctg

SEQ ID NO: 12588 - DNA, 20 bp, Homo sapiens
  source 1..20: mol_type = genomic DNA; note = Gene: TMEM81; note = Location (start to end; relative to TSS): TMEM81_29_59; note = Orientation (relative to transcription): sense; note = sgRNA Position: 205084407; note = Sequence Name: 56322-704_101_SL_seq_12588
tgaaggatatctcatgtcaa

SEQ ID NO: 12589 - DNA, 20 bp, Homo sapiens
  source 1..20: mol_type = genomic DNA; note = Gene: TMEM81; note = Location (start to end; relative to TSS): TMEM81_62_92; note = Orientation (relative to transcription): sense; note = sgRNA Position: 205084374; note = Sequence Name: 56322-704_101_SL_seq_12589
tgatttatagaggattcagc

SEQ ID NO: 12590 - DNA, 20 bp, Homo sapiens
  source 1..20: mol_type = genomic DNA; note = Gene: TMIGD1; note = Location (start to end; relative to TSS): TMIGD1_95_125; note = Orientation (relative to transcription): sense; note = sgRNA Position: 30333938; note = Sequence Name: 56322-704_101_SL_seq_12590
attaaaaacaagccaagtga

SEQ ID NO: 12591 - DNA, 20 bp, Homo sapiens
  source 1..20: mol_type = genomic DNA; note = Gene: TMIGD1; note = Location (start to end; relative to TSS): TMIGD1_132_162; note = Orientation (relative to transcription): sense; note = sgRNA Position: 30333901; note = Sequence Name: 56322-704_101_SL_seq_12591
aagttgctgtctcggtggag

SEQ ID NO: 12592 - DNA, 20 bp, Homo sapiens
  source 1..20: mol_type = genomic DNA; note = Gene: TMIGD1; note = Location (start to end; relative to TSS): TMIGD1_96_126; note = Orientation (relative to transcription): sense; note = sgRNA Position: 30333937; note = Sequence Name: 56322-704_101_SL_seq_12592
ttaaaaacaagccaagtgag

SEQ ID NO: 12593 - DNA, 20 bp, Homo sapiens
  source 1..20: mol_type = genomic DNA; note = Gene: TMIGD1; note = Location (start to end; relative to TSS): TMIGD1_127_157; note = Orientation (relative to transcription): sense; note = sgRNA Position: 30333906; note = Sequence Name: 56322-704_101_SL_seq_12593
ttgaaaagttgctgtctcgg

SEQ ID NO: 12594 - DNA, 20 bp, Homo sapiens
  source 1..20: mol_type = genomic DNA; note = Gene: TMIGD1; note = Location (start to end; relative to TSS): TMIGD1_94_124; note = Orientation (relative to transcription): sense; note = sgRNA Position: 30333939; note = Sequence Name: 56322-704_101_SL_seq_12594
gattaaaaacaagccaagtg

SEQ ID NO: 12595 - DNA, 20 bp, Homo sapiens
  source 1..20: mol_type = genomic DNA; note = Gene: TMIGD1; note = Location (start to end; relative to TSS): TMIGD1_124_154; note = Orientation (relative to transcription): sense; note = sgRNA Position: 30333909; note = Sequence Name: 56322-704_101_SL_seq_12595
attttgaaaagttgctgtct

SEQ ID NO: 12596 - DNA, 20 bp, Homo sapiens
  source 1..20: mol_type = genomic DNA; note = Gene: TMIGD1; note = Location (start to end; relative to TSS): TMIGD1_-13_17; note = Orientation (relative to transcription): sense; note = sgRNA Position: 30334046; note = Sequence Name: 56322-704_101_SL_seq_12596
catttagggttttcaggcag

SEQ ID NO: 12597 - DNA, 20 bp, Homo sapiens
  source 1..20: mol_type = genomic DNA; note = Gene: TMIGD1; note = Location (start to end; relative to TSS): TMIGD1_95_125; note = Orientation (relative to transcription): sense; note = sgRNA Position: 30333938; note = Sequence Name: 56322-704_101_SL_seq_12597
attaaaaacaagccaagtga

SEQ ID NO: 12598 - DNA, 20 bp, Homo sapiens
  source 1..20: mol_type = genomic DNA; note = Gene: TMIGD1; note = Location (start to end; relative to TSS): TMIGD1_-40_-10; note = Orientation (relative to transcription): sense; note = sgRNA Position: 30334073; note = Sequence Name: 56322-704_101_SL_seq_12598
tattataaaggattgtaaca

SEQ ID NO: 12599 - DNA, 20 bp, Homo sapiens
  source 1..20: mol_type = genomic DNA; note = Gene: TMIGD1; note = Location (start to end; relative to TSS): TMIGD1_94_124; note = Orientation (relative to transcription): sense; note = sgRNA Position: 30333939; note = Sequence Name: 56322-704_101_SL_seq_12599
gattaaaaacaagccaagtg

SEQ ID NO: 12600 - DNA, 20 bp, Homo sapiens
  source 1..20: mol_type = genomic DNA; note = Gene: TMIGD2; note = Location (start to end; relative to TSS): TMIGD2_32_62; note = Orientation (relative to transcription): sense; note = sgRNA Position: 4302333; note = Sequence Name: 56322-704_101_SL_seq_12600
cagatctggggtgagtatct

SEQ ID NO: 12601 - DNA, 20 bp, Homo sapiens
  source 1..20: mol_type = genomic DNA; note = Gene: TMIGD2; note = Location (start to end; relative to TSS): TMIGD2_95_125; note = Orientation (relative to transcription): sense; note = sgRNA Position: 4302270; note = Sequence Name: 56322-704_101_SL_seq_12601
gctgcctgccccccagctca

SEQ ID NO: 12602 - DNA, 20 bp, Homo sapiens
  source 1..20: mol_type = genomic DNA; note = Gene: TMIGD2; note = Location (start to end; relative to TSS): TMIGD2_31_61; note = Orientation (relative to transcription): antisense; note = sgRNA Position: 4302354; note = Sequence Name: 56322-704_101_SL_seq_12602
caccccagatctgcaccagg

SEQ ID NO: 12603 - DNA, 20 bp, Homo sapiens
  source 1..20: mol_type = genomic DNA; note = Gene: TMIGD2; note = Location (start to end; relative to TSS): TMIGD2_83_113; note = Orientation (relative to transcription): antisense; note = sgRNA Position: 4302302; note = Sequence Name: 56322-704_101_SL_seq_12603
gctggggatgacagcaagag

SEQ ID NO: 12604 - DNA, 20 bp, Homo sapiens
  source 1..20: mol_type = genomic DNA; note = Gene: TMIGD2; note = Location (start to end; relative to TSS): TMIGD2_20_50; note = Orientation (relative to transcription): sense; note = sgRNA Position: 4302345; note = Sequence Name: 56322-704_101_SL_seq_12604
ggcctcctggtgcagatctg

SEQ ID NO: 12605 - DNA, 20 bp, Homo sapiens
  source 1..20: mol_type = genomic DNA; note = Gene: TMIGD2; note = Location (start to end; relative to TSS): TMIGD2_82_112; note = Orientation (relative to transcription): antisense; note = sgRNA Position: 4302303; note = Sequence Name: 56322-704_101_SL_seq_12605
ctggggatgacagcaagagt

SEQ ID NO: 12606 - DNA, 20 bp, Homo sapiens
  source 1..20: mol_type = genomic DNA; note = Gene: TMIGD2; note = Location (start to end; relative to TSS): TMIGD2_34_64; note = Orientation (relative to transcription): antisense; note = sgRNA Position: 4302351; note = Sequence Name: 56322-704_101_SL_seq_12606
actcaccccagatctgcacc

SEQ ID NO: 12607 - DNA, 20 bp, Homo sapiens
  source 1..20: mol_type = genomic DNA; note = Gene: TMIGD2; note = Location (start to end; relative to TSS): TMIGD2_81_111; note = Orientation (relative to transcription): antisense; note = sgRNA Position: 4302304; note = Sequence Name: 56322-704_101_SL_seq_12607
tggggatgacagcaagagtg

SEQ ID NO: 12608 - DNA, 20 bp, Homo sapiens
  source 1..20: mol_type = genomic DNA; note = Gene: TMIGD2; note = Location (start to end; relative to TSS): TMIGD2_14_44; note = Orientation (relative to transcription): antisense; note = sgRNA Position: 4302371; note = Sequence Name: 56322-704_101_SL_seq_12608
aggaggcccagcaccatgcc

SEQ ID NO: 12609 - DNA, 20 bp, Homo sapiens
  source 1..20: mol_type = genomic DNA; note = Gene: TMIGD2; note = Location (start to end; relative to TSS): TMIGD2_73_103; note = Orientation (relative to transcription): antisense; note = sgRNA Position: 4302312; note = Sequence Name: 56322-704_101_SL_seq_12609
acagcaagagtggggttcag

SEQ ID NO: 12610 - DNA, 20 bp, Homo sapiens
  source 1..20: mol_type = genomic DNA; note = Gene: TREM1; note = Location (start to end; relative to TSS): TREM1_62_92; note = Orientation (relative to transcription): sense; note = sgRNA Position: 41286596; note = Sequence Name: 56322-704_101_SL_seq_12610
tctcaggtaagacaaggaag

SEQ ID NO: 12611 - DNA, 20 bp, Homo sapiens
  source 1..20: mol_type = genomic DNA; note = Gene: TREM1; note = Location (start to end; relative to TSS): TREM1_97_127; note = Orientation (relative to transcription): sense; note = sgRNA Position: 41286561; note = Sequence Name: 56322-704_101_SL_seq_12611
aggcgtttggtccaggatct

SEQ ID NO: 12612 - DNA, 20 bp, Homo sapiens
  source 1..20: mol_type = genomic DNA; note = Gene: TREM1; note = Location (start to end; relative to TSS): TREM1_56_86; note = Orientation (relative to transcription): sense; note = sgRNA Position: 41286602; note = Sequence Name: 56322-704_101_SL_seq_12612
tctttgtctcaggtaagaca

SEQ ID NO: 12613 - DNA, 20 bp, Homo sapiens
  source 1..20: mol_type = genomic DNA; note = Gene: TREM1; note = Location (start to end; relative to TSS): TREM1_90_120; note = Orientation (relative to transcription): sense; note = sgRNA Position: 41286568; note = Sequence Name: 56322-704_101_SL_seq_12613
gcaggggaggcgtttggtcc

SEQ ID NO: 12614 - DNA, 20 bp, Homo sapiens
  source 1..20: mol_type = genomic DNA; note = Gene: TREM1; note = Location (start to end; relative to TSS): TREM1_46_76; note = Orientation (relative to transcription): sense; note = sgRNA Position: 41286612; note = Sequence Name: 56322-704_101_SL_seq_12614
ctgtggatgctctttgtctc

SEQ ID NO: 12615 - DNA, 20 bp, Homo sapiens
  source 1..20: mol_type = genomic DNA; note = Gene: TREM1; note = Location (start to end; relative to TSS): TREM1_77_107; note = Orientation (relative to transcription): sense; note = sgRNA Position: 41286581; note = Sequence Name: 56322-704_101_SL_seq_12615
ggaagaggactgagcagggg

SEQ ID NO: 12616 - DNA, 20 bp, Homo sapiens
  source 1..20: mol_type = genomic DNA; note = Gene: TREM1; note = Location (start to end; relative to TSS): TREM1_29_59; note = Orientation (relative to transcription): sense; note = sgRNA Position: 41286629; note = Sequence Name: 56322-704_101_SL_seq_12616
ccaggctctgggggctgctg

SEQ ID NO: 12617 - DNA, 20 bp, Homo sapiens
  source 1..20: mol_type = genomic DNA; note = Gene: TREM1; note = Location (start to end; relative to TSS): TREM1_62_92; note = Orientation (relative to transcription): sense; note = sgRNA Position: 41286596; note = Sequence Name: 56322-704_101_SL_seq_12617
tctcaggtaagacaaggaag

SEQ ID NO: 12618 - DNA, 20 bp, Homo sapiens
  source 1..20: mol_type = genomic DNA; note = Gene: TREM1; note = Location (start to end; relative to TSS): TREM1_2_32; note = Orientation (relative to transcription): sense; note = sgRNA Position: 41286656; note = Sequence Name: 56322-704_101_SL_seq_12618
gctggtgcacaggaaggatg

SEQ ID NO: 12619 - DNA, 20 bp, Homo sapiens
  source 1..20: mol_type = genomic DNA; note = Gene: TREM1; note = Location (start to end; relative to TSS): TREM1_46_76; note = Orientation (relative to transcription): sense; note = sgRNA Position: 41286612; note = Sequence Name: 56322-704_101_SL_seq_12619
ctgtggatgctctttgtctc

SEQ ID NO: 12620 - DNA, 20 bp, Homo sapiens
  source 1..20: mol_type = genomic DNA; note = Gene: TREM2; note = Location (start to end; relative to TSS): TREM2_46_76; note = Orientation (relative to transcription): antisense; note = sgRNA Position: 41163066; note = Sequence Name: 56322-704_101_SL_seq_12620
caaagagtaagatgagcagc

SEQ ID NO: 12621 - DNA, 20 bp, Homo sapiens
  source 1..20: mol_type = genomic DNA; note = Gene: TREM2; note = Location (start to end; relative to TSS): TREM2_87_117; note = Orientation (relative to transcription): antisense; note = sgRNA Position: 41163025; note = Sequence Name: 56322-704_101_SL_seq_12621
agagaaggcatcacagggca

SEQ ID NO: 12622 - DNA, 20 bp, Homo sapiens
  source 1..20: mol_type = genomic DNA; note = Gene: TREM2; note = Location (start to end; relative to TSS): TREM2_44_74; note = Orientation (relative to transcription): sense; note = sgRNA Position: 41163048; note = Sequence Name: 56322-704_101_SL_seq_12622
ctcatcttactctttgtcac

SEQ ID NO: 12623 - DNA, 20 bp, Homo sapiens
  source 1..20: mol_type = genomic DNA; note = Gene: TREM2; note = Location (start to end; relative to TSS): TREM2_84_114; note = Orientation (relative to transcription): antisense; note = sgRNA Position: 41163028; note = Sequence Name: 56322-704_101_SL_seq_12623
gaaggcatcacagggcacgg

SEQ ID NO: 12624 - DNA, 20 bp, Homo sapiens
  source 1..20: mol_type = genomic DNA; note = Gene: TREM2; note = Location (start to end; relative to TSS): TREM2_41_71; note = Orientation (relative to transcription): antisense; note = sgRNA Position: 41163071; note = Sequence Name: 56322-704_101_SL_seq_12624
agtaagatgagcagccggag

SEQ ID NO: 12625 - DNA, 20 bp, Homo sapiens
  source 1..20: mol_type = genomic DNA; note = Gene: TREM2; note = Location (start to end; relative to TSS): TREM2_83_113; note = Orientation (relative to transcription): antisense; note = sgRNA Position: 41163029; note = Sequence Name: 56322-704_101_SL_seq_12625
aaggcatcacagggcacgga

SEQ ID NO: 12626 - DNA, 20 bp, Homo sapiens
  source 1..20: mol_type = genomic DNA; note = Gene: TREM2; note = Location (start to end; relative to TSS): TREM2_48_78; note = Orientation (relative to transcription): sense; note = sgRNA Position: 41163044; note = Sequence Name: 56322-704_101_SL_seq_12626
tcttactctttgtcacaggt

SEQ ID NO: 12627 - DNA, 20 bp, Homo sapiens
  source 1..20: mol_type = genomic DNA; note = Gene: TREM2; note = Location (start to end; relative to TSS): TREM2_82_112; note = Orientation (relative to transcription): antisense; note = sgRNA Position: 41163030; note = Sequence Name: 56322-704_101_SL_seq_12627
aggcatcacagggcacggag

SEQ ID NO: 12628 - DNA, 20 bp, Homo sapiens
  source 1..20: mol_type = genomic DNA; note = Gene: TREM2; note = Location (start to end; relative to TSS): TREM2_18_48; note = Orientation (relative to transcription): sense; note = sgRNA Position: 41163074; note = Sequence Name: 56322-704_101_SL_seq_12628
agggtggcatggagcctctc

SEQ ID NO: 12629 - DNA, 20 bp, Homo sapiens
  source 1..20: mol_type = genomic DNA; note = Gene: TREM2; note = Location (start to end; relative to TSS): TREM2_48_78; note = Orientation (relative to transcription): sense; note = sgRNA Position: 41163044; note = Sequence Name: 56322-704_101_SL_seq_12629
tcttactctttgtcacaggt

SEQ ID NO: 12630 - DNA, 20 bp, Homo sapiens
  source 1..20: mol_type = genomic DNA; note = Gene: TREML1; note = Location (start to end; relative to TSS): TREML1_54_84; note = Orientation (relative to transcription): antisense; note = sgRNA Position: 41154289; note = Sequence Name: 56322-704_101_SL_seq_12630
agcagggtgaggcccatggc

SEQ ID NO: 12631 - DNA, 20 bp, Homo sapiens
  source 1..20: mol_type = genomic DNA; note = Gene: TREML1; note = Location (start to end; relative to TSS): TREML1_86_116; note = Orientation (relative to transcription): sense; note = sgRNA Position: 41154237; note = Sequence Name: 56322-704_101_SL_seq_12631
actagaaggtaaggttcagg

SEQ ID NO: 12632 - DNA, 20 bp, Homo sapiens
  source 1..20: mol_type = genomic DNA; note = Gene: TREML1; note = Location (start to end; relative to TSS): TREML1_53_83; note = Orientation (relative to transcription): antisense; note = sgRNA Position: 41154290; note = Sequence Name: 56322-704_101_SL_seq_12632
gcagggtgaggcccatggct

SEQ ID NO: 12633 - DNA, 20 bp, Homo sapiens
  source 1..20: mol_type = genomic DNA; note = Gene: TREML1; note = Location (start to end; relative to TSS): TREML1_83_113; note = Orientation (relative to transcription): sense; note = sgRNA Position: 41154240; note = Sequence Name: 56322-704_101_SL_seq_12633
gggactagaaggtaaggttc

SEQ ID NO: 12634 - DNA, 20 bp, Homo sapiens
  source 1..20: mol_type = genomic DNA; note = Gene: TREML1; note = Location (start to end; relative to TSS): TREML1_33_63; note = Orientation (relative to transcription): sense; note = sgRNA Position: 41154290; note = Sequence Name: 56322-704_101_SL_seq_12634
acatttctctgcccagccat

SEQ ID NO: 12635 - DNA, 20 bp, Homo sapiens
  source 1..20: mol_type = genomic DNA; note = Gene: TREML1; note = Location (start to end; relative to TSS): TREML1_63_93; note = Orientation (relative to transcription): sense; note = sgRNA Position: 41154260; note = Sequence Name: 56322-704_101_SL_seq_12635
ctgctcttgctgctgctcct

SEQ ID NO: 12636 - DNA, 20 bp, Homo sapiens
  source 1..20: mol_type = genomic DNA; note = Gene: TREML1; note = Location (start to end; relative to TSS): TREML1_21_51; note = Orientation (relative to transcription): antisense; note = sgRNA Position: 41154322; note = Sequence Name: 56322-704_101_SL_seq_12636
gtcaactcctgggcttgcct

SEQ ID NO: 12637 - DNA, 20 bp, Homo sapiens
  source 1..20: mol_type = genomic DNA; note = Gene: TREML1; note = Location (start to end; relative to TSS): TREML1_54_84; note = Orientation (relative to transcription): antisense; note = sgRNA Position: 41154289; note = Sequence Name: 56322-704_101_SL_seq_12637
agcagggtgaggcccatggc

SEQ ID NO: 12638 - DNA, 20 bp, Homo sapiens
  source 1..20: mol_type = genomic DNA; note = Gene: TREML1; note = Location (start to end; relative to TSS): TREML1_22_52; note = Orientation (relative to transcription): antisense; note = sgRNA Position: 41154321; note = Sequence Name: 56322-704_101_SL_seq_12638
tgtcaactcctgggcttgcc

SEQ ID NO: 12639 - DNA, 20 bp, Homo sapiens
  source 1..20: mol_type = genomic DNA; note = Gene: TREML1; note = Location (start to end; relative to TSS): TREML1_53_83; note = Orientation (relative to transcription): antisense; note = sgRNA Position: 41154290; note = Sequence Name: 56322-704_101_SL_seq_12639
gcagggtgaggcccatggct

SEQ ID NO: 12640 - DNA, 20 bp, Homo sapiens
  source 1..20: mol_type = genomic DNA; note = Gene: TREML2; note = Location (start to end; relative to TSS): TREML2_39_69; note = Orientation (relative to transcription): sense; note = sgRNA Position: 41201086; note = Sequence Name: 56322-704_101_SL_seq_12640
ggtccttccctggcaggccc

SEQ ID NO: 12641 - DNA, 20 bp, Homo sapiens
  source 1..20: mol_type = genomic DNA; note = Gene: TREML2; note = Location (start to end; relative to TSS): TREML2_94_124; note = Orientation (relative to transcription): antisense; note = sgRNA Position: 41201051; note = Sequence Name: 56322-704_101_SL_seq_12641
ggcctggagatccaaggtga

SEQ ID NO: 12642 - DNA, 20 bp, Homo sapiens
  source 1..20: mol_type = genomic DNA; note = Gene: TREML2; note = Location (start to end; relative to TSS): TREML2_44_74; note = Orientation (relative to transcription): antisense; note = sgRNA Position: 41201101; note = Sequence Name: 56322-704_101_SL_seq_12642
ggcctgccagggaaggaccc

SEQ ID NO: 12643 - DNA, 20 bp, Homo sapiens
  source 1..20: mol_type = genomic DNA; note = Gene: TREML2; note = Location (start to end; relative to TSS): TREML2_83_113; note = Orientation (relative to transcription): sense; note = sgRNA Position: 41201042; note = Sequence Name: 56322-704_101_SL_seq_12643
ggccctcaccttggatctcc

SEQ ID NO: 12644 - DNA, 20 bp, Homo sapiens
  source 1..20: mol_type = genomic DNA; note = Gene: TREML2; note = Location (start to end; relative to TSS): TREML2_43_73; note = Orientation (relative to transcription): antisense; note = sgRNA Position: 41201102; note = Sequence Name: 56322-704_101_SL_seq_12644
gcctgccagggaaggacccg

SEQ ID NO: 12645 - DNA, 20 bp, Homo sapiens
  source 1..20: mol_type = genomic DNA; note = Gene: TREML2; note = Location (start to end; relative to TSS): TREML2_79_109; note = Orientation (relative to transcription): antisense; note = sgRNA Position: 41201066; note = Sequence Name: 56322-704_101_SL_seq_12645
ggtgagggcccacccgacac

SEQ ID NO: 12646 - DNA, 20 bp, Homo sapiens
  source 1..20: mol_type = genomic DNA; note = Gene: TREML2; note = Location (start to end; relative to TSS): TREML2_42_72; note = Orientation (relative to transcription): sense; note = sgRNA Position: 41201083; note = Sequence Name: 56322-704_101_SL_seq_12646
ccttccctggcaggcccagg

SEQ ID NO: 12647 - DNA, 20 bp, Homo sapiens
  source 1..20: mol_type = genomic DNA; note = Gene: TREML2; note = Location (start to end; relative to TSS): TREML2_74_104; note = Orientation (relative to transcription): sense; note = sgRNA Position: 41201051; note = Sequence Name: 56322-704_101_SL_seq_12647
tgtcgggtgggccctcacct

SEQ ID NO: 12648 - DNA, 20 bp, Homo sapiens
  source 1..20: mol_type = genomic DNA; note = Gene: TREML2; note = Location (start to end; relative to TSS): TREML2_18_48; note = Orientation (relative to transcription): sense; note = sgRNA Position: 41201107; note = Sequence Name: 56322-704_101_SL_seq_12648
agcttcacttttagaacccc

SEQ ID NO: 12649 - DNA, 20 bp, Homo sapiens
  source 1..20: mol_type = genomic DNA; note = Gene: TREML2; note = Location (start to end; relative to TSS): TREML2_51_81; note = Orientation (relative to transcription): antisense; note = sgRNA Position: 41201094; note = Sequence Name: 56322-704_101_SL_seq_12649
ccacctgggcctgccaggga

SEQ ID NO: 12650 - DNA, 20 bp, Homo sapiens
  source 1..20: mol_type = genomic DNA; note = Gene: TREML4; note = Location (start to end; relative to TSS): TREML4_42_72; note = Orientation (relative to transcription): sense; note = sgRNA Position: 41228417; note = Sequence Name: 56322-704_101_SL_seq_12650
ccgctgtcagaaacagatct

SEQ ID NO: 12651 - DNA, 20 bp, Homo sapiens
  source 1..20: mol_type = genomic DNA; note = Gene: TREML4; note = Location (start to end; relative to TSS): TREML4_96_126; note = Orientation (relative to transcription): antisense; note = sgRNA Position: 41228451; note = Sequence Name: 56322-704_101_SL_seq_12651
acaggtggaagcagcaggtg

SEQ ID NO: 12652 - DNA, 20 bp, Homo sapiens
  source 1..20: mol_type = genomic DNA; note = Gene: TREML4; note = Location (start to end; relative to TSS): TREML4_41_71; note = Orientation (relative to transcription): sense; note = sgRNA Position: 41228416; note = Sequence Name: 56322-704_101_SL_seq_12652
tccgctgtcagaaacagatc

SEQ ID NO: 12653 - DNA, 20 bp, Homo sapiens
  source 1..20: mol_type = genomic DNA; note = Gene: TREML4; note = Location (start to end; relative to TSS): TREML4_83_113; note = Orientation (relative to transcription): antisense; note = sgRNA Position: 41228438; note = Sequence Name: 56322-704_101_SL_seq_12653
gcaggtgtggaccccacccc

SEQ ID NO: 12654 - DNA, 20 bp, Homo sapiens
  source 1..20: mol_type = genomic DNA; note = Gene: TREML4; note = Location (start to end; relative to TSS): TREML4_33_63; note = Orientation (relative to transcription): antisense; note = sgRNA Position: 41228388; note = Sequence Name: 56322-704_101_SL_seq_12654
agcggaggagaggagaaaaa

SEQ ID NO: 12655 - DNA, 20 bp, Homo sapiens
  source 1..20: mol_type = genomic DNA; note = Gene: TREML4; note = Location (start to end; relative to TSS): TREML4_63_93; note = Orientation (relative to transcription): sense; note = sgRNA Position: 41228438; note = Sequence Name: 56322-704_101_SL_seq_12655
ggctggaatggcctggggtg

SEQ ID NO: 12656 - DNA, 20 bp, Homo sapiens
  source 1..20: mol_type = genomic DNA; note = Gene: TREML4; note = Location (start to end; relative to TSS): TREML4_32_62; note = Orientation (relative to transcription): antisense; note = sgRNA Position: 41228387; note = Sequence Name: 56322-704_101_SL_seq_12656
gcggaggagaggagaaaaaa

SEQ ID NO: 12657 - DNA, 20 bp, Homo sapiens
  source 1..20: mol_type = genomic DNA; note = Gene: TREML4; note = Location (start to end; relative to TSS): TREML4_62_92; note = Orientation (relative to transcription): sense; note = sgRNA Position: 41228437; note = Sequence Name: 56322-704_101_SL_seq_12657
gggctggaatggcctggggt

SEQ ID NO: 12658 - DNA, 20 bp, Homo sapiens
  source 1..20: mol_type = genomic DNA; note = Gene: TREML4; note = Location (start to end; relative to TSS): TREML4_20_50; note = Orientation (relative to transcription): antisense; note = sgRNA Position: 41228375; note = Sequence Name: 56322-704_101_SL_seq_12658
agaaaaaagggagccctctc

SEQ ID NO: 12659 - DNA, 20 bp, Homo sapiens
  source 1..20: mol_type = genomic DNA; note = Gene: TREML4; note = Location (start to end; relative to TSS): TREML4_51_81; note = Orientation (relative to transcription): antisense; note = sgRNA Position: 41228406; note = Sequence Name: 56322-704_101_SL_seq_12659
cccagatctgtttctgacag

SEQ ID NO: 12660 - DNA, 20 bp, Homo sapiens
  source 1..20: mol_type = genomic DNA; note = Gene: TRIO; note = Location (start to end; relative to TSS): TRIO_32_62; note = Orientation (relative to transcription): antisense; note = sgRNA Position: 14143380; note = Sequence Name: 56322-704_101_SL_seq_12660
acctccgggatcacgggcgc

SEQ ID NO: 12661 - DNA, 20 bp, Homo sapiens
  source 1..20: mol_type = genomic DNA; note = Gene: TRIO; note = Location (start to end; relative to TSS): TRIO_70_100; note = Orientation (relative to transcription): antisense; note = sgRNA Position: 14143418; note = Sequence Name: 56322-704_101_SL_seq_12661
acgcgcagtcgcgagggcgg

SEQ ID NO: 12662 - DNA, 20 bp, Homo sapiens
  source 1..20: mol_type = genomic DNA; note = Gene: TRIO; note = Location (start to end; relative to TSS): TRIO_19_49; note = Orientation (relative to transcription): sense; note = sgRNA Position: 14143387; note = Sequence Name: 56322-704_101_SL_seq_12662
gccgccggcgcccgtgatcc

SEQ ID NO: 12663 - DNA, 20 bp, Homo sapiens
  source 1..20: mol_type = genomic DNA; note = Gene: TRIO; note = Location (start to end; relative to TSS): TRIO_69_99; note = Orientation (relative to transcription): sense; note = sgRNA Position: 14143437; note = Sequence Name: 56322-704_101_SL_seq_12663
ctcgcgactgcgcgtccggg

SEQ ID NO: 12664 - DNA, 20 bp, Homo sapiens
  source 1..20: mol_type = genomic DNA; note = Gene: TRIO; note = Location (start to end; relative to TSS): TRIO_22_52; note = Orientation (relative to transcription): sense; note = sgRNA Position: 14143390; note = Sequence Name: 56322-704_101_SL_seq_12664
gccggcgcccgtgatcccgg

SEQ ID NO: 12665 - DNA, 20 bp, Homo sapiens
  source 1..20: mol_type = genomic DNA; note = Gene: TRIO; note = Location (start to end; relative to TSS): TRIO_66_96; note = Orientation (relative to transcription): sense; note = sgRNA Position: 14143434; note = Sequence Name: 56322-704_101_SL_seq_12665
gccctcgcgactgcgcgtcc

SEQ ID NO: 12666 - DNA, 20 bp, Homo sapiens
  source 1..20: mol_type = genomic DNA; note = Gene: TRIO; note = Location (start to end; relative to TSS): TRIO_29_59; note = Orientation (relative to transcription): antisense; note = sgRNA Position: 14143377; note = Sequence Name: 56322-704_101_SL_seq_12666
tccgggatcacgggcgccgg

SEQ ID NO: 12667 - DNA, 20 bp, Homo sapiens
  source 1..20: mol_type = genomic DNA; note = Gene: TRIO; note = Location (start to end; relative to TSS): TRIO_65_95; note = Orientation (relative to transcription): sense; note = sgRNA Position: 14143433; note = Sequence Name: 56322-704_101_SL_seq_12667
cgccctcgcgactgcgcgtc

SEQ ID NO: 12668 - DNA, 20 bp, Homo sapiens
  source 1..20: mol_type = genomic DNA; note = Gene: TRIO; note = Location (start to end; relative to TSS): TRIO_31_61; note = Orientation (relative to transcription): sense; note = sgRNA Position: 14143399; note = Sequence Name: 56322-704_101_SL_seq_12668
cgtgatcccggaggtctcgc

SEQ ID NO: 12669 - DNA, 20 bp, Homo sapiens
  source 1..20: mol_type = genomic DNA; note = Gene: TRIO; note = Location (start to end; relative to TSS): TRIO_63_93; note = Orientation (relative to transcription): antisense; note = sgRNA Position: 14143411; note = Sequence Name: 56322-704_101_SL_seq_12669
gtcgcgagggcgggggcccg

SEQ ID NO: 12670 - DNA, 20 bp, Homo sapiens
  source 1..20: mol_type = genomic DNA; note = Gene: TTN; note = Location (start to end; relative to TSS): TTN_21_51; note = Orientation (relative to transcription): antisense; note = sgRNA Position: 178807398; note = Sequence Name: 56322-704_101_SL_seq_12670
caatccctacacccgaggcg

SEQ ID NO: 12671 - DNA, 20 bp, Homo sapiens
  source 1..20: mol_type = genomic DNA; note = Gene: TTN; note = Location (start to end; relative to TSS): TTN_118_148; note = Orientation (relative to transcription): sense; note = sgRNA Position: 178807281; note = Sequence Name: 56322-704_101_SL_seq_12671
cagaaaaaccaactctccat

SEQ ID NO: 12672 - DNA, 20 bp, Homo sapiens
  source 1..20: mol_type = genomic DNA; note = Gene: TTN; note = Location (start to end; relative to TSS): TTN_26_56; note = Orientation (relative to transcription): antisense; note = sgRNA Position: 178807393; note = Sequence Name: 56322-704_101_SL_seq_12672
ctatgcaatccctacacccg

SEQ ID NO: 12673 - DNA, 20 bp, Homo sapiens
  source 1..20: mol_type = genomic DNA; note = Gene: TTN; note = Location (start to end; relative to TSS): TTN_106_136; note = Orientation (relative to transcription): antisense; note = sgRNA Position: 178807313; note = Sequence Name: 56322-704_101_SL_seq_12673
tgaccatctccgacatgaat

SEQ ID NO: 12674 - DNA, 20 bp, Homo sapiens
  source 1..20: mol_type = genomic DNA; note = Gene: TTN; note = Location (start to end; relative to TSS): TTN_17_47; note = Orientation (relative to transcription): antisense; note = sgRNA Position: 178807402; note = Sequence Name: 56322-704_101_SL_seq_12674
ccctacacccgaggcgaggc

SEQ ID NO: 12675 - DNA, 20 bp, Homo sapiens
  source 1..20: mol_type = genomic DNA; note = Gene: TTN; note = Location (start to end; relative to TSS): TTN_94_124; note = Orientation (relative to transcription): sense; note = sgRNA Position: 178807305; note = Sequence Name: 56322-704_101_SL_seq_12675
tcaccgattcatgtcggaga

SEQ ID NO: 12676 - DNA, 20 bp, Homo sapiens
  source 1..20: mol_type = genomic DNA; note = Gene: TTN; note = Location (start to end; relative to TSS): TTN_16_46; note = Orientation (relative to transcription): antisense; note = sgRNA Position: 178807403; note = Sequence Name: 56322-704_101_SL_seq_12676
cctacacccgaggcgaggct

SEQ ID NO: 12677 - DNA, 20 bp, Homo sapiens
  source 1..20: mol_type = genomic DNA; note = Gene: TTN; note = Location (start to end; relative to TSS): TTN_88_118; note = Orientation (relative to transcription): sense; note = sgRNA Position: 178807311; note = Sequence Name: 56322-704_101_SL_seq_12677
agaggctcaccgattcatgt

SEQ ID NO: 12678 - DNA, 20 bp, Homo sapiens
  source 1..20: mol_type = genomic DNA; note = Gene: TTN; note = Location (start to end; relative to TSS): TTN_8_38; note = Orientation (relative to transcription): sense; note = sgRNA Position: 178807391; note = Sequence Name: 56322-704_101_SL_seq_12678
ccagcctcgcctcgggtgta

SEQ ID NO: 12679 - DNA, 20 bp, Homo sapiens
  source 1..20: mol_type = genomic DNA; note = Gene: TTN; note = Location (start to end; relative to TSS): TTN_70_100; note = Orientation (relative to transcription): sense; note = sgRNA Position: 178807329; note = Sequence Name: 56322-704_101_SL_seq_12679
agttttgtttttaggattag

SEQ ID NO: 12680 - DNA, 20 bp, Homo sapiens
  source 1..20: mol_type = genomic DNA; note = Gene: TYRO3; note = Location (start to end; relative to TSS): TYRO3_18_48; note = Orientation (relative to transcription): sense; note = sgRNA Position: 41559256; note = Sequence Name: 56322-704_101_SL_seq_12680
tggtgcggcgtcgccgccga

SEQ ID NO: 12681 - DNA, 20 bp, Homo sapiens
  source 1..20: mol_type = genomic DNA; note = Gene: TYRO3; note = Location (start to end; relative to TSS): TYRO3_82_112; note = Orientation (relative to transcription): antisense; note = sgRNA Position: 41559300; note = Sequence Name: 56322-704_101_SL_seq_12681
ggcggcggcagcggcagcgg

SEQ ID NO: 12682 - DNA, 20 bp, Homo sapiens
  source 1..20: mol_type = genomic DNA; note = Gene: TYRO3; note = Location (start to end; relative to TSS): TYRO3_20_50; note = Orientation (relative to transcription): antisense; note = sgRNA Position: 41559238; note = Sequence Name: 56322-704_101_SL_seq_12682
cggcgacgccgcaccatgcc

SEQ ID NO: 12683 - DNA, 20 bp, Homo sapiens
  source 1..20: mol_type = genomic DNA; note = Gene: TYRO3; note = Location (start to end; relative to TSS): TYRO3_80_110; note = Orientation (relative to transcription): sense; note = sgRNA Position: 41559318; note = Sequence Name: 56322-704_101_SL_seq_12683
tgccgctgccgccgccaccg

SEQ ID NO: 12684 - DNA, 20 bp, Homo sapiens
  source 1..20: mol_type = genomic DNA; note = Gene: TYRO3; note = Location (start to end; relative to TSS): TYRO3_21_51; note = Orientation (relative to transcription): antisense; note = sgRNA Position: 41559239; note = Sequence Name: 56322-704_101_SL_seq_12684
gcggcgacgccgcaccatgc

SEQ ID NO: 12685 - DNA, 20 bp, Homo sapiens
  source 1..20: mol_type = genomic DNA; note = Gene: TYRO3; note = Location (start to end; relative to TSS): TYRO3_80_110; note = Orientation (relative to transcription): sense; note = sgRNA Position: 41559318; note = Sequence Name: 56322-704_101_SL_seq_12685
tgccgctgccgccgccaccg

SEQ ID NO: 12686 - DNA, 20 bp, Homo sapiens
  source 1..20: mol_type = genomic DNA; note = Gene: TYRO3; note = Location (start to end; relative to TSS): TYRO3_15_45; note = Orientation (relative to transcription): antisense; note = sgRNA Position: 41559233; note = Sequence Name: 56322-704_101_SL_seq_12686
acgccgcaccatgccgggcc

SEQ ID NO: 12687 - DNA, 20 bp, Homo sapiens
  source 1..20: mol_type = genomic DNA; note = Gene: TYRO3; note = Location (start to end; relative to TSS): TYRO3_47_77; note = Orientation (relative to transcription): sense; note = sgRNA Position: 41559285; note = Sequence Name: 56322-704_101_SL_seq_12687
ggcggagcatggggcggccg

SEQ ID NO: 12688 - DNA, 20 bp, Homo sapiens
  source 1..20: mol_type = genomic DNA; note = Gene: TYRO3; note = Location (start to end; relative to TSS): TYRO3_3_33; note = Orientation (relative to transcription): sense; note = sgRNA Position: 41559241; note = Sequence Name: 56322-704_101_SL_seq_12688
gggccgggcccggcatggtg

SEQ ID NO: 12689 - DNA, 20 bp, Homo sapiens
  source 1..20: mol_type = genomic DNA; note = Gene: TYRO3; note = Location (start to end; relative to TSS): TYRO3_37_67; note = Orientation (relative to transcription): sense; note = sgRNA Position: 41559275; note = Sequence Name: 56322-704_101_SL_seq_12689
atggcgctgaggcggagcat

SEQ ID NO: 12690 - DNA, 20 bp, Homo sapiens
  source 1..20: mol_type = genomic DNA; note = Gene: UNC5A; note = Location (start to end; relative to TSS): UNC5A_52_82; note = Orientation (relative to transcription): sense; note = sgRNA Position: 176810637; note = Sequence Name: 56322-704_101_SL_seq_12690
ccggaggcagcgcagtccgc

SEQ ID NO: 12691 - DNA, 20 bp, Homo sapiens
  source 1..20: mol_type = genomic DNA; note = Gene: UNC5A; note = Location (start to end; relative to TSS): UNC5A_82_112; note = Orientation (relative to transcription): sense; note = sgRNA Position: 176810667; note = Sequence Name: 56322-704_101_SL_seq_12691
cccgggggcgccccgagctg

SEQ ID NO: 12692 - DNA, 20 bp, Homo sapiens
  source 1..20: mol_type = genomic DNA; note = Gene: UNC5A; note = Location (start to end; relative to TSS): UNC5A_29_59; note = Orientation (relative to transcription): antisense; note = sgRNA Position: 176810594; note = Sequence Name: 56322-704_101_SL_seq_12692
tgccgggcgcacgcggcgcg

SEQ ID NO: 12693 - DNA, 20 bp, Homo sapiens
  source 1..20: mol_type = genomic DNA; note = Gene: UNC5A; note = Location (start to end; relative to TSS): UNC5A_60_90; note = Orientation (relative to transcription): antisense; note = sgRNA Position: 176810625; note = Sequence Name: 56322-704_101_SL_seq_12693
cagcggactgcgctgcctcc

SEQ ID NO: 12694 - DNA, 20 bp, Homo sapiens
  source 1..20: mol_type = genomic DNA; note = Gene: UNC5A; note = Location (start to end; relative to TSS): UNC5A_19_49; note = Orientation (relative to transcription): antisense; note = sgRNA Position: 176810584; note = Sequence Name: 56322-704_101_SL_seq_12694
acgcggcgcgtggctccctt

SEQ ID NO: 12695 - DNA, 20 bp, Homo sapiens
  source 1..20: mol_type = genomic DNA; note = Gene: UNC5A; note = Location (start to end; relative to TSS): UNC5A_57_87; note = Orientation (relative to transcription): antisense; note = sgRNA Position: 176810622; note = Sequence Name: 56322-704_101_SL_seq_12695
cggactgcgctgcctccggg

SEQ ID NO: 12696 - DNA, 20 bp, Homo sapiens
  source 1..20: mol_type = genomic DNA; note = Gene: UNC5A; note = Location (start to end; relative to TSS): UNC5A_14_44; note = Orientation (relative to transcription): antisense; note = sgRNA Position: 176810579; note = Sequence Name: 56322-704_101_SL_seq_12696
gcgcgtggctcccttgggca

SEQ ID NO: 12697 - DNA, 20 bp, Homo sapiens
  source 1..20: mol_type = genomic DNA; note = Gene: UNC5A; note = Location (start to end; relative to TSS): UNC5A_53_83; note = Orientation (relative to transcription): antisense; note = sgRNA Position: 176810618; note = Sequence Name: 56322-704_101_SL_seq_12697
ctgcgctgcctccgggcggc

SEQ ID NO: 12698 - DNA, 20 bp, Homo sapiens
  source 1..20: mol_type = genomic DNA; note = Gene: UNC5A; note = Location (start to end; relative to TSS): UNC5A_13_43; note = Orientation (relative to transcription): antisense; note = sgRNA Position: 176810578; note = Sequence Name: 56322-704_101_SL_seq_12698
cgcgtggctcccttgggcac

SEQ ID NO: 12699 - DNA, 20 bp, Homo sapiens
  source 1..20: mol_type = genomic DNA; note = Gene: UNC5A; note = Location (start to end; relative to TSS): UNC5A_52_82; note = Orientation (relative to transcription): sense; note = sgRNA Position: 176810637; note = Sequence Name: 56322-704_101_SL_seq_12699
ccggaggcagcgcagtccgc

SEQ ID NO: 12700 - DNA, 20 bp, Homo sapiens
  source 1..20: mol_type = genomic DNA; note = Gene: UNC5B; note = Location (start to end; relative to TSS): UNC5B_34_64; note = Orientation (relative to transcription): sense; note = sgRNA Position: 71212630; note = Sequence Name: 56322-704_101_SL_seq_12700
cgcagccgcggggctccgag

SEQ ID NO: 12701 - DNA, 20 bp, Homo sapiens
  source 1..20: mol_type = genomic DNA; note = Gene: UNC5B; note = Location (start to end; relative to TSS): UNC5B_94_124; note = Orientation (relative to transcription): antisense; note = sgRNA Position: 71212670; note = Sequence Name: 56322-704_101_SL_seq_12701
ctcagtggcgctcgcagcgg

SEQ ID NO: 12702 - DNA, 20 bp, Homo sapiens
  source 1..20: mol_type = genomic DNA; note = Gene: UNC5B; note = Location (start to end; relative to TSS): UNC5B_38_68; note = Orientation (relative to transcription): antisense; note = sgRNA Position: 71212614; note = Sequence Name: 56322-704_101_SL_seq_12702
cggagccccgcggctgcgtg

SEQ ID NO: 12703 - DNA, 20 bp, Homo sapiens
  source 1..20: mol_type = genomic DNA; note = Gene: UNC5B; note = Location (start to end; relative to TSS): UNC5B_88_118; note = Orientation (relative to transcription): sense; note = sgRNA Position: 71212684; note = Sequence Name: 56322-704_101_SL_seq_12703
ccgctgcgagcgccactgag

SEQ ID NO: 12704 - DNA, 20 bp, Homo sapiens
  source 1..20: mol_type = genomic DNA; note = Gene: UNC5B; note = Location (start to end; relative to TSS): UNC5B_22_52; note = Orientation (relative to transcription): sense; note = sgRNA Position: 71212618; note = Sequence Name: 56322-704_101_SL_seq_12704
gccggagccgcacgcagccg

SEQ ID NO: 12705 - DNA, 20 bp, Homo sapiens
  source 1..20: mol_type = genomic DNA; note = Gene: UNC5B; note = Location (start to end; relative to TSS): UNC5B_60_90; note = Orientation (relative to transcription): sense; note = sgRNA Position: 71212656; note = Sequence Name: 56322-704_101_SL_seq_12705
gcactggggctgggactgcg

SEQ ID NO: 12706 - DNA, 20 bp, Homo sapiens
  source 1..20: mol_type = genomic DNA; note = Gene: UNC5B; note = Location (start to end; relative to TSS): UNC5B_24_54; note = Orientation (relative to transcription): sense; note = sgRNA Position: 71212620; note = Sequence Name: 56322-704_101_SL_seq_12706
cggagccgcacgcagccgcg

SEQ ID NO: 12707 - DNA, 20 bp, Homo sapiens
  source 1..20: mol_type = genomic DNA; note = Gene: UNC5B; note = Location (start to end; relative to TSS): UNC5B_58_88; note = Orientation (relative to transcription): antisense; note = sgRNA Position: 71212634; note = Sequence Name: 56322-704_101_SL_seq_12707
cagccccagtgcgcgcctct

SEQ ID NO: 12708 - DNA, 20 bp, Homo sapiens
  source 1..20: mol_type = genomic DNA; note = Gene: UNC5B; note = Location (start to end; relative to TSS): UNC5B_20_50; note = Orientation (relative to transcription): antisense; note = sgRNA Position: 71212596; note = Sequence Name: 56322-704_101_SL_seq_12708
tgcggctccggcgccctagc

SEQ ID NO: 12709 - DNA, 20 bp, Homo sapiens
  source 1..20: mol_type = genomic DNA; note = Gene: UNC5B; note = Location (start to end; relative to TSS): UNC5B_51_81; note = Orientation (relative to transcription): sense; note = sgRNA Position: 71212647; note = Sequence Name: 56322-704_101_SL_seq_12709
gagaggcgcgcactggggct

SEQ ID NO: 12710 - DNA, 20 bp, Homo sapiens
  source 1..20: mol_type = genomic DNA; note = Gene: UNC5C; note = Location (start to end; relative to TSS): UNC5C_45_75; note = Orientation (relative to transcription): antisense; note = sgRNA Position: 95548924; note = Sequence Name: 56322-704_101_SL_seq_12710
aaacagctgaaagccccact

SEQ ID NO: 12711 - DNA, 20 bp, Homo sapiens
  source 1..20: mol_type = genomic DNA; note = Gene: UNC5C; note = Location (start to end; relative to TSS): UNC5C_91_121; note = Orientation (relative to transcription): sense; note = sgRNA Position: 95548858; note = Sequence Name: 56322-704_101_SL_seq_12711
gcacacctctgtctacgatg

SEQ ID NO: 12712 - DNA, 20 bp, Homo sapiens
  source 1..20: mol_type = genomic DNA; note = Gene: UNC5C; note = Location (start to end; relative to TSS): UNC5C_46_76; note = Orientation (relative to transcription): antisense; note = sgRNA Position: 95548923; note = Sequence Name: 56322-704_101_SL_seq_12712
caaacagctgaaagccccac

SEQ ID NO: 12713 - DNA, 20 bp, Homo sapiens
  source 1..20: mol_type = genomic DNA; note = Gene: UNC5C; note = Location (start to end; relative to TSS): UNC5C_84_114; note = Orientation (relative to transcription): antisense; note = sgRNA Position: 95548885; note = Sequence Name: 56322-704_101_SL_seq_12713
ggtgtgccggggggagggga

SEQ ID NO: 12714 - DNA, 20 bp, Homo sapiens
  source 1..20: mol_type = genomic DNA; note = Gene: UNC5C; note = Location (start to end; relative to TSS): UNC5C_21_51; note = Orientation (relative to transcription): sense; note = sgRNA Position: 95548928; note = Sequence Name: 56322-704_101_SL_seq_12714
cggattcagcttctgcccag

SEQ ID NO: 12715 - DNA, 20 bp, Homo sapiens
  source 1..20: mol_type = genomic DNA; note = Gene: UNC5C; note = Location (start to end; relative to TSS): UNC5C_83_113; note = Orientation (relative to transcription): antisense; note = sgRNA Position: 95548886; note = Sequence Name: 56322-704_101_SL_seq_12715
gtgtgccggggggaggggag

SEQ ID NO: 12716 - DNA, 20 bp, Homo sapiens
  source 1..20: mol_type = genomic DNA; note = Gene: UNC5C; note = Location (start to end; relative to TSS): UNC5C_22_52; note = Orientation (relative to transcription): sense; note = sgRNA Position: 95548927; note = Sequence Name: 56322-704_101_SL_seq_12716
ggattcagcttctgcccagt

SEQ ID NO: 12717 - DNA, 20 bp, Homo sapiens
  source 1..20: mol_type = genomic DNA; note = Gene: UNC5C; note = Location (start to end; relative to TSS): UNC5C_82_112; note = Orientation (relative to transcription): antisense; note = sgRNA Position: 95548887; note = Sequence Name: 56322-704_101_SL_seq_12717
tgtgccggggggaggggagg

SEQ ID NO: 12718 - DNA, 20 bp, Homo sapiens
  source 1..20: mol_type = genomic DNA; note = Gene: UNC5C; note = Location (start to end; relative to TSS): UNC5C_23_53; note = Orientation (relative to transcription): sense; note = sgRNA Position: 95548926; note = Sequence Name: 56322-704_101_SL_seq_12718
gattcagcttctgcccagtg

SEQ ID NO: 12719 - DNA, 20 bp, Homo sapiens
  source 1..20: mol_type = genomic DNA; note = Gene: UNC5C; note = Location (start to end; relative to TSS): UNC5C_69_99; note = Orientation (relative to transcription): sense; note = sgRNA Position: 95548880; note = Sequence Name: 56322-704_101_SL_seq_12719
ctgtccccctcccctccccc

SEQ ID NO: 12720 - DNA, 20 bp, Homo sapiens
  source 1..20: mol_type = genomic DNA; note = Gene: UNC5D; note = Location (start to end; relative to TSS): UNC5D_37_67; note = Orientation (relative to transcription): sense; note = sgRNA Position: 35235538; note = Sequence Name: 56322-704_101_SL_seq_12720
gcggggactgcgggcgactc

SEQ ID NO: 12721 - DNA, 20 bp, Homo sapiens
  source 1..20: mol_type = genomic DNA; note = Gene: UNC5D; note = Location (start to end; relative to TSS): UNC5D_72_102; note = Orientation (relative to transcription): antisense; note = sgRNA Position: 35235553; note = Sequence Name: 56322-704_101_SL_seq_12721
ggcgaccgctgccgccagcg

SEQ ID NO: 12722 - DNA, 20 bp, Homo sapiens
  source 1..20: mol_type = genomic DNA; note = Gene: UNC5D; note = Location (start to end; relative to TSS): UNC5D_27_57; note = Orientation (relative to transcription): sense; note = sgRNA Position: 35235528; note = Sequence Name: 56322-704_101_SL_seq_12722
gaactgcgcggcggggactg

SEQ ID NO: 12723 - DNA, 20 bp, Homo sapiens
  source 1..20: mol_type = genomic DNA; note = Gene: UNC5D; note = Location (start to end; relative to TSS): UNC5D_65_95; note = Orientation (relative to transcription): antisense; note = sgRNA Position: 35235546; note = Sequence Name: 56322-704_101_SL_seq_12723
gctgccgccagcgcggatgc

SEQ ID NO: 12724 - DNA, 20 bp, Homo sapiens
  source 1..20: mol_type = genomic DNA; note = Gene: UNC5D; note = Location (start to end; relative to TSS): UNC5D_20_50; note = Orientation (relative to transcription): sense; note = sgRNA Position: 35235521; note = Sequence Name: 56322-704_101_SL_seq_12724
gggctgggaactgcgcggcg

SEQ ID NO: 12725 - DNA, 20 bp, Homo sapiens
  source 1..20: mol_type = genomic DNA; note = Gene: UNC5D; note = Location (start to end; relative to TSS): UNC5D_58_88; note = Orientation (relative to transcription): sense; note = sgRNA Position: 35235559; note = Sequence Name: 56322-704_101_SL_seq_12725
ggcatccgcgctggcggcag

SEQ ID NO: 12726 - DNA, 20 bp, Homo sapiens
  source 1..20: mol_type = genomic DNA; note = Gene: UNC5D; note = Location (start to end; relative to TSS): UNC5D_18_48; note = Orientation (relative to transcription): sense; note = sgRNA Position: 35235519; note = Sequence Name: 56322-704_101_SL_seq_12726
gagggctgggaactgcgcgg

SEQ ID NO: 12727 - DNA, 20 bp, Homo sapiens
  source 1..20: mol_type = genomic DNA; note = Gene: UNC5D; note = Location (start to end; relative to TSS): UNC5D_52_82; note = Orientation (relative to transcription): sense; note = sgRNA Position: 35235553; note = Sequence Name: 56322-704_101_SL_seq_12727
gactccggcatccgcgctgg

SEQ ID NO: 12728 - DNA, 20 bp, Homo sapiens
  source 1..20: mol_type = genomic DNA; note = Gene: UNC5D; note = Location (start to end; relative to TSS): UNC5D_19_49; note = Orientation (relative to transcription): sense; note = sgRNA Position: 35235520; note = Sequence Name: 56322-704_101_SL_seq_12728
agggctgggaactgcgcggc

SEQ ID NO: 12729 - DNA, 20 bp, Homo sapiens
  source 1..20: mol_type = genomic DNA; note = Gene: UNC5D; note = Location (start to end; relative to TSS): UNC5D_49_79; note = Orientation (relative to transcription): sense; note = sgRNA Position: 35235550; note = Sequence Name: 56322-704_101_SL_seq_12729
ggcgactccggcatccgcgc

SEQ ID NO: 12730 - DNA, 20 bp, Homo sapiens
  source 1..20: mol_type = genomic DNA; note = Gene: VCAM1; note = Location (start to end; relative to TSS): VCAM1_34_64; note = Orientation (relative to transcription): sense; note = sgRNA Position: 100719802; note = Sequence Name: 56322-704_101_SL_seq_12730
cctcccaggcacacacaggt

SEQ ID NO: 12731 - DNA, 20 bp, Homo sapiens
  source 1..20: mol_type = genomic DNA; note = Gene: VCAM1; note = Location (start to end; relative to TSS): VCAM1_103_133; note = Orientation (relative to transcription): sense; note = sgRNA Position: 100719871; note = Sequence Name: 56322-704_101_SL_seq_12731
acttaaaatgcctgggaaga

SEQ ID NO: 12732 - DNA, 20 bp, Homo sapiens
  source 1..20: mol_type = genomic DNA; note = Gene: VCAM1; note = Location (start to end; relative to TSS): VCAM1_33_63; note = Orientation (relative to transcription): sense; note = sgRNA Position: 100719801; note = Sequence Name: 56322-704_101_SL_seq_12732
ccctcccaggcacacacagg

SEQ ID NO: 12733 - DNA, 20 bp, Homo sapiens
  source 1..20: mol_type = genomic DNA; note = Gene: VCAM1; note = Location (start to end; relative to TSS): VCAM1_96_126; note = Orientation (relative to transcription): sense; note = sgRNA Position: 100719864; note = Sequence Name: 56322-704_101_SL_seq_12733
gacagcaacttaaaatgcct

SEQ ID NO: 12734 - DNA, 20 bp, Homo sapiens
  source 1..20: mol_type = genomic DNA; note = Gene: VCAM1; note = Location (start to end; relative to TSS): VCAM1_30_60; note = Orientation (relative to transcription): sense; note = sgRNA Position: 100719798; note = Sequence Name: 56322-704_101_SL_seq_12734
ataccctcccaggcacacac

SEQ ID NO: 12735 - DNA, 20 bp, Homo sapiens
  source 1..20: mol_type = genomic DNA; note = Gene: VCAM1; note = Location (start to end; relative to TSS): VCAM1_95_125; note = Orientation (relative to transcription): sense; note = sgRNA Position: 100719863; note = Sequence Name: 56322-704_101_SL_seq_12735
cgacagcaacttaaaatgcc

SEQ ID NO: 12736 - DNA, 20 bp, Homo sapiens
  source 1..20: mol_type = genomic DNA; note = Gene: VCAM1; note = Location (start to end; relative to TSS): VCAM1_42_72; note = Orientation (relative to transcription): antisense; note = sgRNA Position: 100719790; note = Sequence Name: 56322-704_101_SL_seq_12736
ccacctgtgtgtgcctggga

SEQ ID NO: 12737 - DNA, 20 bp, Homo sapiens
  source 1..20: mol_type = genomic DNA; note = Gene: VCAM1; note = Location (start to end; relative to TSS): VCAM1_87_117; note = Orientation (relative to transcription): antisense; note = sgRNA Position: 100719835; note = Sequence Name: 56322-704_101_SL_seq_12737
ctgtcgtgatgagaaaatag

SEQ ID NO: 12738 - DNA, 20 bp, Homo sapiens
  source 1..20: mol_type = genomic DNA; note = Gene: VCAM1; note = Location (start to end; relative to TSS): VCAM1_20_50; note = Orientation (relative to transcription): sense; note = sgRNA Position: 100719788; note = Sequence Name: 56322-704_101_SL_seq_12738
caggagctgaataccctccc

SEQ ID NO: 12739 - DNA, 20 bp, Homo sapiens
  source 1..20: mol_type = genomic DNA; note = Gene: VCAM1; note = Location (start to end; relative to TSS): VCAM1_53_83; note = Orientation (relative to transcription): sense; note = sgRNA Position: 100719821; note = Sequence Name: 56322-704_101_SL_seq_12739
tgggacacaaataagggttt

SEQ ID NO: 12740 - DNA, 20 bp, Homo sapiens
  source 1..20: mol_type = genomic DNA; note = Gene: VCAN; note = Location (start to end; relative to TSS): VCAN_31_61; note = Orientation (relative to transcription): antisense; note = sgRNA Position: 83471781; note = Sequence Name: 56322-704_101_SL_seq_12740
cctggagttcttccccagaa

SEQ ID NO: 12741 - DNA, 20 bp, Homo sapiens
  source 1..20: mol_type = genomic DNA; note = Gene: VCAN; note = Location (start to end; relative to TSS): VCAN_71_101; note = Orientation (relative to transcription): sense; note = sgRNA Position: 83471841; note = Sequence Name: 56322-704_101_SL_seq_12741
taggtgttgtggacaggagc

SEQ ID NO: 12742 - DNA, 20 bp, Homo sapiens
  source 1..20: mol_type = genomic DNA; note = Gene: VCAN; note = Location (start to end; relative to TSS): VCAN_25_55; note = Orientation (relative to transcription): antisense; note = sgRNA Position: 83471775; note = Sequence Name: 56322-704_101_SL_seq_12742
gttcttccccagaaaggctc

SEQ ID NO: 12743 - DNA, 20 bp, Homo sapiens
  source 1..20: mol_type = genomic DNA; note = Gene: VCAN; note = Location (start to end; relative to TSS): VCAN_70_100; note = Orientation (relative to transcription): antisense; note = sgRNA Position: 83471820; note = Sequence Name: 56322-704_101_SL_seq_12743
tccacaacacctaatgttct

SEQ ID NO: 12744 - DNA, 20 bp, Homo sapiens
  source 1..20: mol_type = genomic DNA; note = Gene: VCAN; note = Location (start to end; relative to TSS): VCAN_24_54; note = Orientation (relative to transcription): antisense; note = sgRNA Position: 83471774; note = Sequence Name: 56322-704_101_SL_seq_12744
ttcttccccagaaaggctcg

SEQ ID NO: 12745 - DNA, 20 bp, Homo sapiens
  source 1..20: mol_type = genomic DNA; note = Gene: VCAN; note = Location (start to end; relative to TSS): VCAN_65_95; note = Orientation (relative to transcription): sense; note = sgRNA Position: 83471835; note = Sequence Name: 56322-704_101_SL_seq_12745
gaacattaggtgttgtggac

SEQ ID NO: 12746 - DNA, 20 bp, Homo sapiens
  source 1..20: mol_type = genomic DNA; note = Gene: VCAN; note = Location (start to end; relative to TSS): VCAN_29_59; note = Orientation (relative to transcription): sense; note = sgRNA Position: 83471799; note = Sequence Name: 56322-704_101_SL_seq_12746
ggggaagaactccaggcgtg

SEQ ID NO: 12747 - DNA, 20 bp, Homo sapiens
  source 1..20: mol_type = genomic DNA; note = Gene: VCAN; note = Location (start to end; relative to TSS): VCAN_60_90; note = Orientation (relative to transcription): sense; note = sgRNA Position: 83471830; note = Sequence Name: 56322-704_101_SL_seq_12747
gccgagaacattaggtgttg

SEQ ID NO: 12748 - DNA, 20 bp, Homo sapiens
  source 1..20: mol_type = genomic DNA; note = Gene: VCAN; note = Location (start to end; relative to TSS): VCAN_22_52; note = Orientation (relative to transcription): sense; note = sgRNA Position: 83471792; note = Sequence Name: 56322-704_101_SL_seq_12748
cctttctggggaagaactcc

SEQ ID NO: 12749 - DNA, 20 bp, Homo sapiens
  source 1..20: mol_type = genomic DNA; note = Gene: VCAN; note = Location (start to end; relative to TSS): VCAN_52_82; note = Orientation (relative to transcription): sense; note = sgRNA Position: 83471822; note = Sequence Name: 56322-704_101_SL_seq_12749
acgcaacagccgagaacatt

SEQ ID NO: 12750 - DNA, 20 bp, Homo sapiens
  source 1..20: mol_type = genomic DNA; note = Gene: VPREB1; note = Location (start to end; relative to TSS): VPREB1_45_75; note = Orientation (relative to transcription): antisense; note = sgRNA Position: 22244837; note = Sequence Name: 56322-704_101_SL_seq_12750
agtagacaaacagcatgagc

SEQ ID NO: 12751 - DNA, 20 bp, Homo sapiens
  source 1..20: mol_type = genomic DNA; note = Gene: VPREB1; note = Location (start to end; relative to TSS): VPREB1_105_135; note = Orientation (relative to transcription): sense; note = sgRNA Position: 22244917; note = Sequence Name: 56322-704_101_SL_seq_12751
ttcatcctgccctgccccca

SEQ ID NO: 12752 - DNA, 20 bp, Homo sapiens
  source 1..20: mol_type = genomic DNA; note = Gene: VPREB1; note = Location (start to end; relative to TSS): VPREB1_43_73; note = Orientation (relative to transcription): sense; note = sgRNA Position: 22244855; note = Sequence Name: 56322-704_101_SL_seq_12752
atgctgtttgtctactgcac

SEQ ID NO: 12753 - DNA, 20 bp, Homo sapiens
  source 1..20: mol_type = genomic DNA; note = Gene: VPREB1; note = Location (start to end; relative to TSS): VPREB1_102_132; note = Orientation (relative to transcription): antisense; note = sgRNA Position: 22244894; note = Sequence Name: 56322-704_101_SL_seq_12753
ggcaggatgaaggaaggggc

SEQ ID NO: 12754 - DNA, 20 bp, Homo sapiens
  source 1..20: mol_type = genomic DNA; note = Gene: VPREB1; note = Location (start to end; relative to TSS): VPREB1_26_56; note = Orientation (relative to transcription): antisense; note = sgRNA Position: 22244818; note = Sequence Name: 56322-704_101_SL_seq_12754
caggacaggagcccaggaca

SEQ ID NO: 12755 - DNA, 20 bp, Homo sapiens
  source 1..20: mol_type = genomic DNA; note = Gene: VPREB1; note = Location (start to end; relative to TSS): VPREB1_92_122; note = Orientation (relative to transcription): antisense; note = sgRNA Position: 22244884; note = Sequence Name: 56322-704_101_SL_seq_12755
aggaaggggcaggagtcttt

SEQ ID NO: 12756 - DNA, 20 bp, Homo sapiens
  source 1..20: mol_type = genomic DNA; note = Gene: VPREB1; note = Location (start to end; relative to TSS): VPREB1_32_62; note = Orientation (relative to transcription): antisense; note = sgRNA Position: 22244824; note = Sequence Name: 56322-704_101_SL_seq_12756
catgagcaggacaggagccc

SEQ ID NO: 12757 - DNA, 20 bp, Homo sapiens
  source 1..20: mol_type = genomic DNA; note = Gene: VPREB1; note = Location (start to end; relative to TSS): VPREB1_84_114; note = Orientation (relative to transcription): antisense; note = sgRNA Position: 22244876; note = Sequence Name: 56322-704_101_SL_seq_12757
gcaggagtctttgggatctg

SEQ ID NO: 12758 - DNA, 20 bp, Homo sapiens
  source 1..20: mol_type = genomic DNA; note = Gene: VPREB1; note = Location (start to end; relative to TSS): VPREB1_40_70; note = Orientation (relative to transcription): antisense; note = sgRNA Position: 22244832; note = Sequence Name: 56322-704_101_SL_seq_12758
acaaacagcatgagcaggac

SEQ ID NO: 12759 - DNA, 20 bp, Homo sapiens
  source 1..20: mol_type = genomic DNA; note = Gene: VPREB1; note = Location (start to end; relative to TSS): VPREB1_83_113; note = Orientation (relative to transcription): antisense; note = sgRNA Position: 22244875; note = Sequence Name: 56322-704_101_SL_seq_12759
caggagtctttgggatctgg

SEQ ID NO: 12760 - DNA, 20 bp, Homo sapiens
  source 1..20: mol_type = genomic DNA; note = Gene: VPREB3; note = Location (start to end; relative to TSS): VPREB3_54_84; note = Orientation (relative to transcription): antisense; note = sgRNA Position: 23754367; note = Sequence Name: 56322-704_101_SL_seq_12760
caccggcaggccatggccag

SEQ ID NO: 12761 - DNA, 20 bp, Homo sapiens
  source 1..20: mol_type = genomic DNA; note = Gene: VPREB3; note = Location (start to end; relative to TSS): VPREB3_96_126; note = Orientation (relative to transcription): sense; note = sgRNA Position: 23754305; note = Sequence Name: 56322-704_101_SL_seq_12761
ctgtcaggtgaatctttcct

SEQ ID NO: 12762 - DNA, 20 bp, Homo sapiens
  source 1..20: mol_type = genomic DNA; note = Gene: VPREB3; note = Location (start to end; relative to TSS): VPREB3_43_73; note = Orientation (relative to transcription): sense; note = sgRNA Position: 23754358; note = Sequence Name: 56322-704_101_SL_seq_12762
tgcctctggccatggcctgc

SEQ ID NO: 12763 - DNA, 20 bp, Homo sapiens
  source 1..20: mol_type = genomic DNA; note = Gene: VPREB3; note = Location (start to end; relative to TSS): VPREB3_77_107; note = Orientation (relative to transcription): antisense; note = sgRNA Position: 23754344; note = Sequence Name: 56322-704_101_SL_seq_12763
tccccatcagaaggaagctg

SEQ ID NO: 12764 - DNA, 20 bp, Homo sapiens
  source 1..20: mol_type = genomic DNA; note = Gene: VPREB3; note = Location (start to end; relative to TSS): VPREB3_35_65; note = Orientation (relative to transcription): sense; note = sgRNA Position: 23754366; note = Sequence Name: 56322-704_101_SL_seq_12764
tgcctccctgcctctggcca

SEQ ID NO: 12765 - DNA, 20 bp, Homo sapiens
  source 1..20: mol_type = genomic DNA; note = Gene: VPREB3; note = Location (start to end; relative to TSS): VPREB3_65_95; note = Orientation (relative to transcription): sense; note = sgRNA Position: 23754336; note = Sequence Name: 56322-704_101_SL_seq_12765
gtgcctcagcttccttctga

SEQ ID NO: 12766 - DNA, 20 bp, Homo sapiens
  source 1..20: mol_type = genomic DNA; note = Gene: VPREB3; note = Location (start to end; relative to TSS): VPREB3_29_59; note = Orientation (relative to transcription): sense; note = sgRNA Position: 23754372; note = Sequence Name: 56322-704_101_SL_seq_12766
cttgcctgcctccctgcctc

SEQ ID NO: 12767 - DNA, 20 bp, Homo sapiens
  source 1..20: mol_type = genomic DNA; note = Gene: VPREB3; note = Location (start to end; relative to TSS): VPREB3_61_91; note = Orientation (relative to transcription): antisense; note = sgRNA Position: 23754360; note = Sequence Name: 56322-704_101_SL_seq_12767
gctgaggcaccggcaggcca

SEQ ID NO: 12768 - DNA, 20 bp, Homo sapiens
  source 1..20: mol_type = genomic DNA; note = Gene: VPREB3; note = Location (start to end; relative to TSS): VPREB3_22_52; note = Orientation (relative to transcription): antisense; note = sgRNA Position: 23754399; note = Sequence Name: 56322-704_101_SL_seq_12768
aggcaagtagaagttctgca

SEQ ID NO: 12769 - DNA, 20 bp, Homo sapiens
  source 1..20: mol_type = genomic DNA; note = Gene: VPREB3; note = Location (start to end; relative to TSS): VPREB3_54_84; note = Orientation (relative to transcription): antisense; note = sgRNA Position: 23754367; note = Sequence Name: 56322-704_101_SL_seq_12769
caccggcaggccatggccag

SEQ ID NO: 12770 - DNA, 20 bp, Homo sapiens
  source 1..20: mol_type = genomic DNA; note = Gene: VSIG1; note = Location (start to end; relative to TSS): VSIG1_56_86; note = Orientation (relative to transcription): antisense; note = sgRNA Position: 108045127; note = Sequence Name: 56322-704_101_SL_seq_12770
atgcgaacaccattgtgtgg

SEQ ID NO: 12771 - DNA, 20 bp, Homo sapiens
  source 1..20: mol_type = genomic DNA; note = Gene: VSIG1; note = Location (start to end; relative to TSS): VSIG1_94_124; note = Orientation (relative to transcription): sense; note = sgRNA Position: 108045185; note = Sequence Name: 56322-704_101_SL_seq_12771
gctgccttgcaggtaaggaa

SEQ ID NO: 12772 - DNA, 20 bp, Homo sapiens
  source 1..20: mol_type = genomic DNA; note = Gene: VSIG1; note = Location (start to end; relative to TSS): VSIG1_59_89; note = Orientation (relative to transcription): antisense; note = sgRNA Position: 108045130; note = Sequence Name: 56322-704_101_SL_seq_12772
aaaatgcgaacaccattgtg

SEQ ID NO: 12773 - DNA, 20 bp, Homo sapiens
  source 1..20: mol_type = genomic DNA; note = Gene: VSIG1; note = Location (start to end; relative to TSS): VSIG1_89_119; note = Orientation (relative to transcription): sense; note = sgRNA Position: 108045180; note = Sequence Name: 56322-704_101_SL_seq_12773
cctaagctgccttgcaggta

SEQ ID NO: 12774 - DNA, 20 bp, Homo sapiens
  source 1..20: mol_type = genomic DNA; note = Gene: VSIG1; note = Location (start to end; relative to TSS): VSIG1_38_68; note = Orientation (relative to transcription): sense; note = sgRNA Position: 108045129; note = Sequence Name: 56322-704_101_SL_seq_12774
ctcaactaacctccacacaa

SEQ ID NO: 12775 - DNA, 20 bp, Homo sapiens
  source 1..20: mol_type = genomic DNA; note = Gene: VSIG1; note = Location (start to end; relative to TSS): VSIG1_84_114; note = Orientation (relative to transcription): sense; note = sgRNA Position: 108045175; note = Sequence Name: 56322-704_101_SL_seq_12775
ctgatcctaagctgccttgc

SEQ ID NO: 12776 - DNA, 20 bp, Homo sapiens
  source 1..20: mol_type = genomic DNA; note = Gene: VSIG1; note = Location (start to end; relative to TSS): VSIG1_20_50; note = Orientation (relative to transcription): antisense; note = sgRNA Position: 108045091; note = Sequence Name: 56322-704_101_SL_seq_12776
gcaggtgccagtagcttgcc

SEQ ID NO: 12777 - DNA, 20 bp, Homo sapiens
  source 1..20: mol_type = genomic DNA; note = Gene: VSIG1; note = Location (start to end; relative to TSS): VSIG1_59_89; note = Orientation (relative to transcription): antisense; note = sgRNA Position: 108045130; note = Sequence Name: 56322-704_101_SL_seq_12777
aaaatgcgaacaccattgtg

SEQ ID NO: 12778 - DNA, 20 bp, Homo sapiens
  source 1..20: mol_type = genomic DNA; note = Gene: VSIG1; note = Location (start to end; relative to TSS): VSIG1_14_44; note = Orientation (relative to transcription): antisense; note = sgRNA Position: 108045085; note = Sequence Name: 56322-704_101_SL_seq_12778
gccagtagcttgcctggact

SEQ ID NO: 12779 - DNA, 20 bp, Homo sapiens
  source 1..20: mol_type = genomic DNA; note = Gene: VSIG1; note = Location (start to end; relative to TSS): VSIG1_56_86; note = Orientation (relative to transcription): antisense; note = sgRNA Position: 108045127; note = Sequence Name: 56322-704_101_SL_seq_12779
atgcgaacaccattgtgtgg

SEQ ID NO: 12780 - DNA, 20 bp, Homo sapiens
  source 1..20: mol_type = genomic DNA; note = Gene: VSIG10; note = Location (start to end; relative to TSS): VSIG10_39_69; note = Orientation (relative to transcription): sense; note = sgRNA Position: 118103948; note = Sequence Name: 56322-704_101_SL_seq_12780
tcctgttgttttccgccggc

SEQ ID NO: 12781 - DNA, 20 bp, Homo sapiens
  source 1..20: mol_type = genomic DNA; note = Gene: VSIG10; note = Location (start to end; relative to TSS): VSIG10_90_120; note = Orientation (relative to transcription): sense; note = sgRNA Position: 118103897; note = Sequence Name: 56322-704_101_SL_seq_12781
tgcgccctccctccccggcc

SEQ ID NO: 12782 - DNA, 20 bp, Homo sapiens
  source 1..20: mol_type = genomic DNA; note = Gene: VSIG10; note = Location (start to end; relative to TSS): VSIG10_43_73; note = Orientation (relative to transcription): antisense; note = sgRNA Position: 118103964; note = Sequence Name: 56322-704_101_SL_seq_12782
cggcggaaaacaacaggagc

SEQ ID NO: 12783 - DNA, 20 bp, Homo sapiens
  source 1..20: mol_type = genomic DNA; note = Gene: VSIG10; note = Location (start to end; relative to TSS): VSIG10_85_115; note = Orientation (relative to transcription): sense; note = sgRNA Position: 118103902; note = Sequence Name: 56322-704_101_SL_seq_12783
cggggtgcgccctccctccc

SEQ ID NO: 12784 - DNA, 20 bp, Homo sapiens
  source 1..20: mol_type = genomic DNA; note = Gene: VSIG10; note = Location (start to end; relative to TSS): VSIG10_35_65; note = Orientation (relative to transcription): sense; note = sgRNA Position: 118103952; note = Sequence Name: 56322-704_101_SL_seq_12784
ccgctcctgttgttttccgc

SEQ ID NO: 12785 - DNA, 20 bp, Homo sapiens
  source 1..20: mol_type = genomic DNA; note = Gene: VSIG10; note = Location (start to end; relative to TSS): VSIG10_85_115; note = Orientation (relative to transcription): sense; note = sgRNA Position: 118103902; note = Sequence Name: 56322-704_101_SL_seq_12785
cggggtgcgccctccctccc

SEQ ID NO: 12786 - DNA, 20 bp, Homo sapiens
  source 1..20: mol_type = genomic DNA; note = Gene: VSIG10; note = Location (start to end; relative to TSS): VSIG10_20_50; note = Orientation (relative to transcription): antisense; note = sgRNA Position: 118103987; note = Sequence Name: 56322-704_101_SL_seq_12786
atccctcccgcctcccagcc

SEQ ID NO: 12787 - DNA, 20 bp, Homo sapiens
  source 1..20: mol_type = genomic DNA; note = Gene: VSIG10; note = Location (start to end; relative to TSS): VSIG10_52_82; note = Orientation (relative to transcription): sense; note = sgRNA Position: 118103935; note = Sequence Name: 56322-704_101_SL_seq_12787
cgccggcaggagtaggctgg

SEQ ID NO: 12788 - DNA, 20 bp, Homo sapiens
  source 1..20: mol_type = genomic DNA; note = Gene: VSIG10; note = Location (start to end; relative to TSS): VSIG10_17_47; note = Orientation (relative to transcription): antisense; note = sgRNA Position: 118103990; note = Sequence Name: 56322-704_101_SL_seq_12788
cctcccgcctcccagccagg

SEQ ID NO: 12789 - DNA, 20 bp, Homo sapiens
  source 1..20: mol_type = genomic DNA; note = Gene: VSIG10; note = Location (start to end; relative to TSS): VSIG10_49_79; note = Orientation (relative to transcription): sense; note = sgRNA Position: 118103938; note = Sequence Name: 56322-704_101_SL_seq_12789
ttccgccggcaggagtaggc

SEQ ID NO: 12790 - DNA, 20 bp, Homo sapiens
  source 1..20: mol_type = genomic DNA; note = Gene: VSIG10L; note = Location (start to end; relative to TSS): VSIG10L_51_81; note = Orientation (relative to transcription): antisense; note = sgRNA Position: 51342084; note = Sequence Name: 56322-704_101_SL_seq_12790
actgagcagggaacttaccc

SEQ ID NO: 12791 - DNA, 20 bp, Homo sapiens
  source 1..20: mol_type = genomic DNA; note = Gene: VSIG10L; note = Location (start to end; relative to TSS): VSIG10L_91_121; note = Orientation (relative to transcription): antisense; note = sgRNA Position: 51342044; note = Sequence Name: 56322-704_101_SL_seq_12791
gcattgggggaggctgctga

SEQ ID NO: 12792 - DNA, 20 bp, Homo sapiens
  source 1..20: mol_type = genomic DNA; note = Gene: VSIG10L; note = Location (start to end; relative to TSS): VSIG10L_45_75; note = Orientation (relative to transcription): antisense; note = sgRNA Position: 51342090; note = Sequence Name: 56322-704_101_SL_seq_12792
cagggaacttacccaggagt

SEQ ID NO: 12793 - DNA, 20 bp, Homo sapiens
  source 1..20: mol_type = genomic DNA; note = Gene: VSIG10L; note = Location (start to end; relative to TSS): VSIG10L_75_105; note = Orientation (relative to transcription): antisense; note = sgRNA Position: 51342060; note = Sequence Name: 56322-704_101_SL_seq_12793
ctgagggagactgacaggga

SEQ ID NO: 12794 - DNA, 20 bp, Homo sapiens
  source 1..20: mol_type = genomic DNA; note = Gene: VSIG10L; note = Location (start to end; relative to TSS): VSIG10L_37_67; note = Orientation (relative to transcription): antisense; note = sgRNA Position: 51342098; note = Sequence Name: 56322-704_101_SL_seq_12794
ttacccaggagtaggaagag

SEQ ID NO: 12795 - DNA, 20 bp, Homo sapiens
  source 1..20: mol_type = genomic DNA; note = Gene: VSIG10L; note = Location (start to end; relative to TSS): VSIG10L_74_104; note = Orientation (relative to transcription): antisense; note = sgRNA Position: 51342061; note = Sequence Name: 56322-704_101_SL_seq_12795
tgagggagactgacagggaa

SEQ ID NO: 12796 - DNA, 20 bp, Homo sapiens
  source 1..20: mol_type = genomic DNA; note = Gene: VSIG10L; note = Location (start to end; relative to TSS): VSIG10L_25_55; note = Orientation (relative to transcription): sense; note = sgRNA Position: 51342090; note = Sequence Name: 56322-704_101_SL_seq_12796
ctgccactcttcctactcct

SEQ ID NO: 12797 - DNA, 20 bp, Homo sapiens
  source 1..20: mol_type = genomic DNA; note = Gene: VSIG10L; note = Location (start to end; relative to TSS): VSIG10L_63_93; note = Orientation (relative to transcription): antisense; note = sgRNA Position: 51342072; note = Sequence Name: 56322-704_101_SL_seq_12797
gacagggaagggactgagca

SEQ ID NO: 12798 - DNA, 20 bp, Homo sapiens
  source 1..20: mol_type = genomic DNA; note = Gene: VSIG10L; note = Location (start to end; relative to TSS): VSIG10L_8_38; note = Orientation (relative to transcription): antisense; note = sgRNA Position: 51342127; note = Sequence Name: 56322-704_101_SL_seq_12798
ctgtgggttgtccatggtgc

SEQ ID NO: 12799 - DNA, 20 bp, Homo sapiens
  source 1..20: mol_type = genomic DNA; note = Gene: VSIG10L; note = Location (start to end; relative to TSS): VSIG10L_45_75; note = Orientation (relative to transcription): antisense; note = sgRNA Position: 51342090; note = Sequence Name: 56322-704_101_SL_seq_12799
cagggaacttacccaggagt

SEQ ID NO: 12800 - DNA, 20 bp, Homo sapiens
  source 1..20: mol_type = genomic DNA; note = Gene: VSIG2; note = Location (start to end; relative to TSS): VSIG2_43_73; note = Orientation (relative to transcription): antisense; note = sgRNA Position: 124752208; note = Sequence Name: 56322-704_101_SL_seq_12800
tctgggtgtcgggcagggaa

SEQ ID NO: 12801 - DNA, 20 bp, Homo sapiens
  source 1..20: mol_type = genomic DNA; note = Gene: VSIG2; note = Location (start to end; relative to TSS): VSIG2_75_105; note = Orientation (relative to transcription): sense; note = sgRNA Position: 124752156; note = Sequence Name: 56322-704_101_SL_seq_12801
ctggcaggagcaggacagga

SEQ ID NO: 12802 - DNA, 20 bp, Homo sapiens
  source 1..20: mol_type = genomic DNA; note = Gene: VSIG2; note = Location (start to end; relative to TSS): VSIG2_31_61; note = Orientation (relative to transcription): antisense; note = sgRNA Position: 124752220; note = Sequence Name: 56322-704_101_SL_seq_12802
gcagggaagggagcacccaa

SEQ ID NO: 12803 - DNA, 20 bp, Homo sapiens
  source 1..20: mol_type = genomic DNA; note = Gene: VSIG2; note = Location (start to end; relative to TSS): VSIG2_70_100; note = Orientation (relative to transcription): antisense; note = sgRNA Position: 124752181; note = Sequence Name: 56322-704_101_SL_seq_12803
tcctgccaggtgggcggtca

SEQ ID NO: 12804 - DNA, 20 bp, Homo sapiens
  source 1..20: mol_type = genomic DNA; note = Gene: VSIG2; note = Location (start to end; relative to TSS): VSIG2_32_62; note = Orientation (relative to transcription): antisense; note = sgRNA Position: 124752219; note = Sequence Name: 56322-704_101_SL_seq_12804
ggcagggaagggagcaccca

SEQ ID NO: 12805 - DNA, 20 bp, Homo sapiens
  source 1..20: mol_type = genomic DNA; note = Gene: VSIG2; note = Location (start to end; relative to TSS): VSIG2_66_96; note = Orientation (relative to transcription): antisense; note = sgRNA Position: 124752185; note = Sequence Name: 56322-704_101_SL_seq_12805
gccaggtgggcggtcaaggt

SEQ ID NO: 12806 - DNA, 20 bp, Homo sapiens
  source 1..20: mol_type = genomic DNA; note = Gene: VSIG2; note = Location (start to end; relative to TSS): VSIG2_20_50; note = Orientation (relative to transcription): antisense; note = sgRNA Position: 124752231; note = Sequence Name: 56322-704_101_SL_seq_12806
agcacccaagggcagccgcc

SEQ ID NO: 12807 - DNA, 20 bp, Homo sapiens
  source 1..20: mol_type = genomic DNA; note = Gene: VSIG2; note = Location (start to end; relative to TSS): VSIG2_53_83; note = Orientation (relative to transcription): antisense; note = sgRNA Position: 124752198; note = Sequence Name: 56322-704_101_SL_seq_12807
tcaaggtcggtctgggtgtc

SEQ ID NO: 12808 - DNA, 20 bp, Homo sapiens
  source 1..20: mol_type = genomic DNA; note = Gene: VSIG2; note = Location (start to end; relative to TSS): VSIG2_19_49; note = Orientation (relative to transcription): antisense; note = sgRNA Position: 124752232; note = Sequence Name: 56322-704_101_SL_seq_12808
gcacccaagggcagccgccc

SEQ ID NO: 12809 - DNA, 20 bp, Homo sapiens
  source 1..20: mol_type = genomic DNA; note = Gene: VSIG2; note = Location (start to end; relative to TSS): VSIG2_49_79; note = Orientation (relative to transcription): antisense; note = sgRNA Position: 124752202; note = Sequence Name: 56322-704_101_SL_seq_12809
ggtcggtctgggtgtcgggc

SEQ ID NO: 12810 - DNA, 20 bp, Homo sapiens
  source 1..20: mol_type = genomic DNA; note = Gene: VSIG4; note = Location (start to end; relative to TSS): VSIG4_46_76; note = Orientation (relative to transcription): sense; note = sgRNA Position: 66040010; note = Sequence Name: 56322-704_101_SL_seq_12810
agaaaggacagaagtagctc

SEQ ID NO: 12811 - DNA, 20 bp, Homo sapiens
  source 1..20: mol_type = genomic DNA; note = Gene: VSIG4; note = Location (start to end; relative to TSS): VSIG4_84_114; note = Orientation (relative to transcription): sense; note = sgRNA Position: 66039972; note = Sequence Name: 56322-704_101_SL_seq_12811
tactgggcctgctactcctg

SEQ ID NO: 12812 - DNA, 20 bp, Homo sapiens
  source 1..20: mol_type = genomic DNA; note = Gene: VSIG4; note = Location (start to end; relative to TSS): VSIG4_30_60; note = Orientation (relative to transcription): sense; note = sgRNA Position: 66040026; note = Sequence Name: 56322-704_101_SL_seq_12812
gtagcaggaggctggaagaa

SEQ ID NO: 12813 - DNA, 20 bp, Homo sapiens
  source 1..20: mol_type = genomic DNA; note = Gene: VSIG4; note = Location (start to end; relative to TSS): VSIG4_83_113; note = Orientation (relative to transcription): sense; note = sgRNA Position: 66039973; note = Sequence Name: 56322-704_101_SL_seq_12813
ttactgggcctgctactcct

SEQ ID NO: 12814 - DNA, 20 bp, Homo sapiens
  source 1..20: mol_type = genomic DNA; note = Gene: VSIG4; note = Location (start to end; relative to TSS): VSIG4_31_61; note = Orientation (relative to transcription): antisense; note = sgRNA Position: 66040045; note = Sequence Name: 56322-704_101_SL_seq_12814
ccagcctcctgctaccaaag

SEQ ID NO: 12815 - DNA, 20 bp, Homo sapiens
  source 1..20: mol_type = genomic DNA; note = Gene: VSIG4; note = Location (start to end; relative to TSS): VSIG4_68_98; note = Orientation (relative to transcription): sense; note = sgRNA Position: 66039988; note = Sequence Name: 56322-704_101_SL_seq_12815
gctgtgatggggatcttact

SEQ ID NO: 12816 - DNA, 20 bp, Homo sapiens
  source 1..20: mol_type = genomic DNA; note = Gene: VSIG4; note = Location (start to end; relative to TSS): VSIG4_18_48; note = Orientation (relative to transcription): sense; note = sgRNA Position: 66040038; note = Sequence Name: 56322-704_101_SL_seq_12816
tgagcctctttggtagcagg

SEQ ID NO: 12817 - DNA, 20 bp, Homo sapiens
  source 1..20: mol_type = genomic DNA; note = Gene: VSIG4; note = Location (start to end; relative to TSS): VSIG4_56_86; note = Orientation (relative to transcription): sense; note = sgRNA Position: 66040000; note = Sequence Name: 56322-704_101_SL_seq_12817
gaagtagctctggctgtgat

SEQ ID NO: 12818 - DNA, 20 bp, Homo sapiens
  source 1..20: mol_type = genomic DNA; note = Gene: VSIG4; note = Location (start to end; relative to TSS): VSIG4_22_52; note = Orientation (relative to transcription): sense; note = sgRNA Position: 66040034; note = Sequence Name: 56322-704_101_SL_seq_12818
cctctttggtagcaggaggc

SEQ ID NO: 12819 - DNA, 20 bp, Homo sapiens
  source 1..20: mol_type = genomic DNA; note = Gene: VSIG4; note = Location (start to end; relative to TSS): VSIG4_55_85; note = Orientation (relative to transcription): sense; note = sgRNA Position: 66040001; note = Sequence Name: 56322-704_101_SL_seq_12819
agaagtagctctggctgtga

SEQ ID NO: 12820 - DNA, 20 bp, Homo sapiens
  source 1..20: mol_type = genomic DNA; note = Gene: VSIG8; note = Location (start to end; relative to TSS): VSIG8_40_70; note = Orientation (relative to transcription): antisense; note = sgRNA Position: 159862613; note = Sequence Name: 56322-704_101_SL_seq_12820
gtggagggagggggagctga

SEQ ID NO: 12821 - DNA, 20 bp, Homo sapiens
  source 1..20: mol_type = genomic DNA; note = Gene: VSIG8; note = Location (start to end; relative to TSS): VSIG8_76_106; note = Orientation (relative to transcription): antisense; note = sgRNA Position: 159862577; note = Sequence Name: 56322-704_101_SL_seq_12821
tcccgtggggtcgtagtggt

SEQ ID NO: 12822 - DNA, 20 bp, Homo sapiens
  source 1..20: mol_type = genomic DNA; note = Gene: VSIG8; note = Location (start to end; relative to TSS): VSIG8_24_54; note = Orientation (relative to transcription): antisense; note = sgRNA Position: 159862629; note = Sequence Name: 56322-704_101_SL_seq_12822
ctgagggcccagacactgcc

SEQ ID NO: 12823 - DNA, 20 bp, Homo sapiens
  source 1..20: mol_type = genomic DNA; note = Gene: VSIG8; note = Location (start to end; relative to TSS): VSIG8_59_89; note = Orientation (relative to transcription): antisense; note = sgRNA Position: 159862594; note = Sequence Name: 56322-704_101_SL_seq_12823
ggtgggtgtgagggggtagg

SEQ ID NO: 12824 - DNA, 20 bp, Homo sapiens
  source 1..20: mol_type = genomic DNA; note = Gene: VSIG8; note = Location (start to end; relative to TSS): VSIG8_23_53; note = Orientation (relative to transcription): antisense; note = sgRNA Position: 159862630; note = Sequence Name: 56322-704_101_SL_seq_12824
tgagggcccagacactgcct

SEQ ID NO: 12825 - DNA, 20 bp, Homo sapiens
  source 1..20: mol_type = genomic DNA; note = Gene: VSIG8; note = Location (start to end; relative to TSS): VSIG8_55_85; note = Orientation (relative to transcription): antisense; note = sgRNA Position: 159862598; note = Sequence Name: 56322-704_101_SL_seq_12825
ggtgtgagggggtaggtgga

SEQ ID NO: 12826 - DNA, 20 bp, Homo sapiens
  source 1..20: mol_type = genomic DNA; note = Gene: VSIG8; note = Location (start to end; relative to TSS): VSIG8_22_52; note = Orientation (relative to transcription): antisense; note = sgRNA Position: 159862631; note = Sequence Name: 56322-704_101_SL_seq_12826
gagggcccagacactgcctg

SEQ ID NO: 12827 - DNA, 20 bp, Homo sapiens
  source 1..20: mol_type = genomic DNA; note = Gene: VSIG8; note = Location (start to end; relative to TSS): VSIG8_52_82; note = Orientation (relative to transcription): antisense; note = sgRNA Position: 159862601; note = Sequence Name: 56322-704_101_SL_seq_12827
gtgagggggtaggtggaggg

SEQ ID NO: 12828 - DNA, 20 bp, Homo sapiens
  source 1..20: mol_type = genomic DNA; note = Gene: VSIG8; note = Location (start to end; relative to TSS): VSIG8_19_49; note = Orientation (relative to transcription): antisense; note = sgRNA Position: 159862634; note = Sequence Name: 56322-704_101_SL_seq_12828
ggcccagacactgcctgggg

SEQ ID NO: 12829 - DNA, 20 bp, Homo sapiens
  source 1..20: mol_type = genomic DNA; note = Gene: VSIG8; note = Location (start to end; relative to TSS): VSIG8_49_79; note = Orientation (relative to transcription): antisense; note = sgRNA Position: 159862604; note = Sequence Name: 56322-704_101_SL_seq_12829
agggggtaggtggagggagg

SEQ ID NO: 12830 - DNA, 20 bp, Homo sapiens
  source 1..20: mol_type = genomic DNA; note = Gene: VSIR; note = Location (start to end; relative to TSS): VSIR_37_67; note = Orientation (relative to transcription): antisense; note = sgRNA Position: 71773479; note = Sequence Name: 56322-704_101_SL_seq_12830
aacttctggtgccggggagc

SEQ ID NO: 12831 - DNA, 20 bp, Homo sapiens
  source 1..20: mol_type = genomic DNA; note = Gene: VSIR; note = Location (start to end; relative to TSS): VSIR_75_105; note = Orientation (relative to transcription): sense; note = sgRNA Position: 71773421; note = Sequence Name: 56322-704_101_SL_seq_12831
gggcgtccccacggccctgg

SEQ ID NO: 12832 - DNA, 20 bp, Homo sapiens
  source 1..20: mol_type = genomic DNA; note = Gene: VSIR; note = Location (start to end; relative to TSS): VSIR_38_68; note = Orientation (relative to transcription): antisense; note = sgRNA Position: 71773478; note = Sequence Name: 56322-704_101_SL_seq_12832
gaacttctggtgccggggag

SEQ ID NO: 12833 - DNA, 20 bp, Homo sapiens
  source 1..20: mol_type = genomic DNA; note = Gene: VSIR; note = Location (start to end; relative to TSS): VSIR_72_102; note = Orientation (relative to transcription): sense; note = sgRNA Position: 71773424; note = Sequence Name: 56322-704_101_SL_seq_12833
catgggcgtccccacggccc

SEQ ID NO: 12834 - DNA, 20 bp, Homo sapiens
  source 1..20: mol_type = genomic DNA; note = Gene: VSIR; note = Location (start to end; relative to TSS): VSIR_33_63; note = Orientation (relative to transcription): antisense; note = sgRNA Position: 71773483; note = Sequence Name: 56322-704_101_SL_seq_12834
tctggtgccggggagcgggc

SEQ ID NO: 12835 - DNA, 20 bp, Homo sapiens
  source 1..20: mol_type = genomic DNA; note = Gene: VSIR; note = Location (start to end; relative to TSS): VSIR_71_101; note = Orientation (relative to transcription): antisense; note = sgRNA Position: 71773445; note = Sequence Name: 56322-704_101_SL_seq_12835
ggggacgcccatgtcgccgt

SEQ ID NO: 12836 - DNA, 20 bp, Homo sapiens
  source 1..20: mol_type = genomic DNA; note = Gene: VSIR; note = Location (start to end; relative to TSS): VSIR_34_64; note = Orientation (relative to transcription): antisense; note = sgRNA Position: 71773482; note = Sequence Name: 56322-704_101_SL_seq_12836
ttctggtgccggggagcggg

SEQ ID NO: 12837 - DNA, 20 bp, Homo sapiens
  source 1..20: mol_type = genomic DNA; note = Gene: VSIR; note = Location (start to end; relative to TSS): VSIR_66_96; note = Orientation (relative to transcription): sense; note = sgRNA Position: 71773430; note = Sequence Name: 56322-704_101_SL_seq_12837
cggcgacatgggcgtcccca

SEQ ID NO: 12838 - DNA, 20 bp, Homo sapiens
  source 1..20: mol_type = genomic DNA; note = Gene: VSIR; note = Location (start to end; relative to TSS): VSIR_27_57; note = Orientation (relative to transcription): antisense; note = sgRNA Position: 71773489; note = Sequence Name: 56322-704_101_SL_seq_12838
gccggggagcgggcgggacg

SEQ ID NO: 12839 - DNA, 20 bp, Homo sapiens
  source 1..20: mol_type = genomic DNA; note = Gene: VSIR; note = Location (start to end; relative to TSS): VSIR_60_90; note = Orientation (relative to transcription): antisense; note = sgRNA Position: 71773456; note = Sequence Name: 56322-704_101_SL_seq_12839
tgtcgccgtcggacgcgcag

SEQ ID NO: 12840 - DNA, 20 bp, Homo sapiens
  source 1..20: mol_type = genomic DNA; note = Gene: VSTM1; note = Location (start to end; relative to TSS): VSTM1_47_77; note = Orientation (relative to transcription): sense; note = sgRNA Position: 54063826; note = Sequence Name: 56322-704_101_SL_seq_12840
agtcccgctccgcctttgaa

SEQ ID NO: 12841 - DNA, 20 bp, Homo sapiens
  source 1..20: mol_type = genomic DNA; note = Gene: VSTM1; note = Location (start to end; relative to TSS): VSTM1_84_114; note = Orientation (relative to transcription): sense; note = sgRNA Position: 54063789; note = Sequence Name: 56322-704_101_SL_seq_12841
gggccttggttctggcagaa

SEQ ID NO: 12842 - DNA, 20 bp, Homo sapiens
  source 1..20: mol_type = genomic DNA; note = Gene: VSTM1; note = Location (start to end; relative to TSS): VSTM1_35_65; note = Orientation (relative to transcription): antisense; note = sgRNA Position: 54063858; note = Sequence Name: 56322-704_101_SL_seq_12842
ctgggccggccgcagctctc

SEQ ID NO: 12843 - DNA, 20 bp, Homo sapiens
  source 1..20: mol_type = genomic DNA; note = Gene: VSTM1; note = Location (start to end; relative to TSS): VSTM1_65_95; note = Orientation (relative to transcription): antisense; note = sgRNA Position: 54063828; note = Sequence Name: 56322-704_101_SL_seq_12843
tgggttttacccttcaaagg

SEQ ID NO: 12844 - DNA, 20 bp, Homo sapiens
  source 1..20: mol_type = genomic DNA; note = Gene: VSTM1; note = Location (start to end; relative to TSS): VSTM1_27_57; note = Orientation (relative to transcription): antisense; note = sgRNA Position: 54063866; note = Sequence Name: 56322-704_101_SL_seq_12844
gccgcagctctccggctgcc

SEQ ID NO: 12845 - DNA, 20 bp, Homo sapiens
  source 1..20: mol_type = genomic DNA; note = Gene: VSTM1; note = Location (start to end; relative to TSS): VSTM1_59_89; note = Orientation (relative to transcription): sense; note = sgRNA Position: 54063814; note = Sequence Name: 56322-704_101_SL_seq_12845
cctttgaagggtaaaaccca

SEQ ID NO: 12846 - DNA, 20 bp, Homo sapiens
  source 1..20: mol_type = genomic DNA; note = Gene: VSTM1; note = Location (start to end; relative to TSS): VSTM1_21_51; note = Orientation (relative to transcription): sense; note = sgRNA Position: 54063852; note = Sequence Name: 56322-704_101_SL_seq_12846
ggcagccggagagctgcggc

SEQ ID NO: 12847 - DNA, 20 bp, Homo sapiens
  source 1..20: mol_type = genomic DNA; note = Gene: VSTM1; note = Location (start to end; relative to TSS): VSTM1_53_83; note = Orientation (relative to transcription): antisense; note = sgRNA Position: 54063840; note = Sequence Name: 56322-704_101_SL_seq_12847
ttcaaaggcggagcgggact

SEQ ID NO: 12848 - DNA, 20 bp, Homo sapiens
  source 1..20: mol_type = genomic DNA; note = Gene: VSTM1; note = Location (start to end; relative to TSS): VSTM1_17_47; note = Orientation (relative to transcription): sense; note = sgRNA Position: 54063856; note = Sequence Name: 56322-704_101_SL_seq_12848
accgggcagccggagagctg

SEQ ID NO: 12849 - DNA, 20 bp, Homo sapiens
  source 1..20: mol_type = genomic DNA; note = Gene: VSTM1; note = Location (start to end; relative to TSS): VSTM1_47_77; note = Orientation (relative to transcription): sense; note = sgRNA Position: 54063826; note = Sequence Name: 56322-704_101_SL_seq_12849
agtcccgctccgcctttgaa

SEQ ID NO: 12850 - DNA, 20 bp, Homo sapiens
  source 1..20: mol_type = genomic DNA; note = Gene: VSTM2A; note = Location (start to end; relative to TSS): VSTM2A_38_68; note = Orientation (relative to transcription): sense; note = sgRNA Position: 54542439; note = Sequence Name: 56322-704_101_SL_seq_12850
ccggagcggcgggctgacgt

SEQ ID NO: 12851 - DNA, 20 bp, Homo sapiens
  source 1..20: mol_type = genomic DNA; note = Gene: VSTM2A; note = Location (start to end; relative to TSS): VSTM2A_100_130; note = Orientation (relative to transcription): antisense; note = sgRNA Position: 54542481; note = Sequence Name: 56322-704_101_SL_seq_12851
tgggaagtgtctcggctgcc

SEQ ID NO: 12852 - DNA, 20 bp, Homo sapiens
  source 1..20: mol_type = genomic DNA; note = Gene: VSTM2A; note = Location (start to end; relative to TSS): VSTM2A_24_54; note = Orientation (relative to transcription): sense; note = sgRNA Position: 54542425; note = Sequence Name: 56322-704_101_SL_seq_12852
agtgatcacgcaagccggag

SEQ ID NO: 12853 - DNA, 20 bp, Homo sapiens
  source 1..20: mol_type = genomic DNA; note = Gene: VSTM2A; note = Location (start to end; relative to TSS): VSTM2A_78_108; note = Orientation (relative to transcription): antisense; note = sgRNA Position: 54542459; note = Sequence Name: 56322-704_101_SL_seq_12853
gctgcctgctttcagctacc

SEQ ID NO: 12854 - DNA, 20 bp, Homo sapiens
  source 1..20: mol_type = genomic DNA; note = Gene: VSTM2A; note = Location (start to end; relative to TSS): VSTM2A_27_57; note = Orientation (relative to transcription): sense; note = sgRNA Position: 54542428; note = Sequence Name: 56322-704_101_SL_seq_12854
gatcacgcaagccggagcgg

SEQ ID NO: 12855 - DNA, 20 bp, Homo sapiens
  source 1..20: mol_type = genomic DNA; note = Gene: VSTM2A; note = Location (start to end; relative to TSS): VSTM2A_73_103; note = Orientation (relative to transcription): sense; note = sgRNA Position: 54542474; note = Sequence Name: 56322-704_101_SL_seq_12855
gtagctgaaagcaggcagcc

SEQ ID NO: 12856 - DNA, 20 bp, Homo sapiens
  source 1..20: mol_type = genomic DNA; note = Gene: VSTM2A; note = Location (start to end; relative to TSS): VSTM2A_28_58; note = Orientation (relative to transcription): sense; note = sgRNA Position: 54542429; note = Sequence Name: 56322-704_101_SL_seq_12856
atcacgcaagccggagcggc

SEQ ID NO: 12857 - DNA, 20 bp, Homo sapiens
  source 1..20: mol_type = genomic DNA; note = Gene: VSTM2A; note = Location (start to end; relative to TSS): VSTM2A_65_95; note = Orientation (relative to transcription): sense; note = sgRNA Position: 54542466; note = Sequence Name: 56322-704_101_SL_seq_12857
gctgccaggtagctgaaagc

SEQ ID NO: 12858 - DNA, 20 bp, Homo sapiens
  source 1..20: mol_type = genomic DNA; note = Gene: VSTM2A; note = Location (start to end; relative to TSS): VSTM2A_19_49; note = Orientation (relative to transcription): sense; note = sgRNA Position: 54542420; note = Sequence Name: 56322-704_101_SL_seq_12858
agggcagtgatcacgcaagc

SEQ ID NO: 12859 - DNA, 20 bp, Homo sapiens
  source 1..20: mol_type = genomic DNA; note = Gene: VSTM2A; note = Location (start to end; relative to TSS): VSTM2A_51_81; note = Orientation (relative to transcription): sense; note = sgRNA Position: 54542452; note = Sequence Name: 56322-704_101_SL_seq_12859
ctgacgttggacgagctgcc

SEQ ID NO: 12860 - DNA, 20 bp, Homo sapiens
  source 1..20: mol_type = genomic DNA; note = Gene: VSTM2B; note = Location (start to end; relative to TSS): VSTM2B_23_53; note = Orientation (relative to transcription): antisense; note = sgRNA Position: 29526023; note = Sequence Name: 56322-704_101_SL_seq_12860
cggggagagcgggtccggcg

SEQ ID NO: 12861 - DNA, 20 bp, Homo sapiens
  source 1..20: mol_type = genomic DNA; note = Gene: VSTM2B; note = Location (start to end; relative to TSS): VSTM2B_78_108; note = Orientation (relative to transcription): antisense; note = sgRNA Position: 29526078; note = Sequence Name: 56322-704_101_SL_seq_12861
ggcgagtgggcgctcagccg

SEQ ID NO: 12862 - DNA, 20 bp, Homo sapiens
  source 1..20: mol_type = genomic DNA; note = Gene: VSTM2B; note = Location (start to end; relative to TSS): VSTM2B_26_56; note = Orientation (relative to transcription): sense; note = sgRNA Position: 29526046; note = Sequence Name: 56322-704_101_SL_seq_12862
cgctctccccgcgctgcgct

SEQ ID NO: 12863 - DNA, 20 bp, Homo sapiens
  source 1..20: mol_type = genomic DNA; note = Gene: VSTM2B; note = Location (start to end; relative to TSS): VSTM2B_75_105; note = Orientation (relative to transcription): sense; note = sgRNA Position: 29526095; note = Sequence Name: 56322-704_101_SL_seq_12863
ctgagcgcccactcgccctg

SEQ ID NO: 12864 - DNA, 20 bp, Homo sapiens
  source 1..20: mol_type = genomic DNA; note = Gene: VSTM2B; note = Location (start to end; relative to TSS): VSTM2B_28_58; note = Orientation (relative to transcription): antisense; note = sgRNA Position: 29526028; note = Sequence Name: 56322-704_101_SL_seq_12864
cagcgcggggagagcgggtc

SEQ ID NO: 12865 - DNA, 20 bp, Homo sapiens
  source 1..20: mol_type = genomic DNA; note = Gene: VSTM2B; note = Location (start to end; relative to TSS): VSTM2B_65_95; note = Orientation (relative to transcription): antisense; note = sgRNA Position: 29526065; note = Sequence Name: 56322-704_101_SL_seq_12865
tcagccgcggcgcgcagacc

SEQ ID NO: 12866 - DNA, 20 bp, Homo sapiens
  source 1..20: mol_type = genomic DNA; note = Gene: VSTM2B; note = Location (start to end; relative to TSS): VSTM2B_30_60; note = Orientation (relative to transcription): sense; note = sgRNA Position: 29526050; note = Sequence Name: 56322-704_101_SL_seq_12866
ctccccgcgctgcgctgggt

SEQ ID NO: 12867 - DNA, 20 bp, Homo sapiens
  source 1..20: mol_type = genomic DNA; note = Gene: VSTM2B; note = Location (start to end; relative to TSS): VSTM2B_65_95; note = Orientation (relative to transcription): antisense; note = sgRNA Position: 29526065; note = Sequence Name: 56322-704_101_SL_seq_12867
tcagccgcggcgcgcagacc

SEQ ID NO: 12868 - DNA, 20 bp, Homo sapiens
  source 1..20: mol_type = genomic DNA; note = Gene: VSTM2B; note = Location (start to end; relative to TSS): VSTM2B_20_50; note = Orientation (relative to transcription): antisense; note = sgRNA Position: 29526020; note = Sequence Name: 56322-704_101_SL_seq_12868
ggagagcgggtccggcgtgg

SEQ ID NO: 12869 - DNA, 20 bp, Homo sapiens
  source 1..20: mol_type = genomic DNA; note = Gene: VSTM2B; note = Location (start to end; relative to TSS): VSTM2B_52_82; note = Orientation (relative to transcription): sense; note = sgRNA Position: 29526072; note = Sequence Name: 56322-704_101_SL_seq_12869
gacgccaggtctgcgcgccg

SEQ ID NO: 12870 - DNA, 20 bp, Homo sapiens
  source 1..20: mol_type = genomic DNA; note = Gene: VSTM2L; note = Location (start to end; relative to TSS): VSTM2L_43_73; note = Orientation (relative to transcription): antisense; note = sgRNA Position: 37903176; note = Sequence Name: 56322-704_101_SL_seq_12870
gcccggctccggcccagccc

SEQ ID NO: 12871 - DNA, 20 bp, Homo sapiens
  source 1..20: mol_type = genomic DNA; note = Gene: VSTM2L; note = Location (start to end; relative to TSS): VSTM2L_77_107; note = Orientation (relative to transcription): sense; note = sgRNA Position: 37903230; note = Sequence Name: 56322-704_101_SL_seq_12871
ggtccggggacagcgggcga

SEQ ID NO: 12872 - DNA, 20 bp, Homo sapiens
  source 1..20: mol_type = genomic DNA; note = Gene: VSTM2L; note = Location (start to end; relative to TSS): VSTM2L_35_65; note = Orientation (relative to transcription): antisense; note = sgRNA Position: 37903168; note = Sequence Name: 56322-704_101_SL_seq_12872
ccggcccagccccggcttcg

SEQ ID NO: 12873 - DNA, 20 bp, Homo sapiens
  source 1..20: mol_type = genomic DNA; note = Gene: VSTM2L; note = Location (start to end; relative to TSS): VSTM2L_71_101; note = Orientation (relative to transcription): sense; note = sgRNA Position: 37903224; note = Sequence Name: 56322-704_101_SL_seq_12873
gggccgggtccggggacagc

SEQ ID NO: 12874 - DNA, 20 bp, Homo sapiens
  source 1..20: mol_type = genomic DNA; note = Gene: VSTM2L; note = Location (start to end; relative to TSS): VSTM2L_39_69; note = Orientation (relative to transcription): sense; note = sgRNA Position: 37903192; note = Sequence Name: 56322-704_101_SL_seq_12874
gctgggccggagccgggcga

SEQ ID NO: 12875 - DNA, 20 bp, Homo sapiens
  source 1..20: mol_type = genomic DNA; note = Gene: VSTM2L; note = Location (start to end; relative to TSS): VSTM2L_70_100; note = Orientation (relative to transcription): sense; note = sgRNA Position: 37903223; note = Sequence Name: 56322-704_101_SL_seq_12875
tgggccgggtccggggacag

SEQ ID NO: 12876 - DNA, 20 bp, Homo sapiens
  source 1..20: mol_type = genomic DNA; note = Gene: VSTM2L; note = Location (start to end; relative to TSS): VSTM2L_33_63; note = Orientation (relative to transcription): sense; note = sgRNA Position: 37903186; note = Sequence Name: 56322-704_101_SL_seq_12876
gccggggctgggccggagcc

SEQ ID NO: 12877 - DNA, 20 bp, Homo sapiens
  source 1..20: mol_type = genomic DNA; note = Gene: VSTM2L; note = Location (start to end; relative to TSS): VSTM2L_63_93; note = Orientation (relative to transcription): sense; note = sgRNA Position: 37903216; note = Sequence Name: 56322-704_101_SL_seq_12877
tgggagctgggccgggtccg

SEQ ID NO: 12878 - DNA, 20 bp, Homo sapiens
  source 1..20: mol_type = genomic DNA; note = Gene: VSTM2L; note = Location (start to end; relative to TSS): VSTM2L_26_56; note = Orientation (relative to transcription): sense; note = sgRNA Position: 37903179; note = Sequence Name: 56322-704_101_SL_seq_12878
ccccgaagccggggctgggc

SEQ ID NO: 12879 - DNA, 20 bp, Homo sapiens
  source 1..20: mol_type = genomic DNA; note = Gene: VSTM2L; note = Location (start to end; relative to TSS): VSTM2L_56_86; note = Orientation (relative to transcription): sense; note = sgRNA Position: 37903209; note = Sequence Name: 56322-704_101_SL_seq_12879
cgagggctgggagctgggcc

SEQ ID NO: 12880 - DNA, 20 bp, Homo sapiens
  source 1..20: mol_type = genomic DNA; note = Gene: VSTM4; note = Location (start to end; relative to TSS): VSTM4_48_78; note = Orientation (relative to transcription): sense; note = sgRNA Position: 49115450; note = Sequence Name: 56322-704_101_SL_seq_12880
cggcggccgcgctgctggcg

SEQ ID NO: 12881 - DNA, 20 bp, Homo sapiens
  source 1..20: mol_type = genomic DNA; note = Gene: VSTM4; note = Location (start to end; relative to TSS): VSTM4_83_113; note = Orientation (relative to transcription): antisense; note = sgRNA Position: 49115435; note = Sequence Name: 56322-704_101_SL_seq_12881
ccgccgcgcttacccggagc

SEQ ID NO: 12882 - DNA, 20 bp, Homo sapiens
  source 1..20: mol_type = genomic DNA; note = Gene: VSTM4; note = Location (start to end; relative to TSS): VSTM4_28_58; note = Orientation (relative to transcription): sense; note = sgRNA Position: 49115470; note = Sequence Name: 56322-704_101_SL_seq_12882
gatgcggctgctggcactgg

SEQ ID NO: 12883 - DNA, 20 bp, Homo sapiens
  source 1..20: mol_type = genomic DNA; note = Gene: VSTM4; note = Location (start to end; relative to TSS): VSTM4_74_104; note = Orientation (relative to transcription): sense; note = sgRNA Position: 49115424; note = Sequence Name: 56322-704_101_SL_seq_12883
ccggctccgggtaagcgcgg

SEQ ID NO: 12884 - DNA, 20 bp, Homo sapiens
  source 1..20: mol_type = genomic DNA; note = Gene: VSTM4; note = Location (start to end; relative to TSS): VSTM4_31_61; note = Orientation (relative to transcription): sense; note = sgRNA Position: 49115467; note = Sequence Name: 56322-704_101_SL_seq_12884
gcggctgctggcactggcgg

SEQ ID NO: 12885 - DNA, 20 bp, Homo sapiens
  source 1..20: mol_type = genomic DNA; note = Gene: VSTM4; note = Location (start to end; relative to TSS): VSTM4_71_101; note = Orientation (relative to transcription): sense; note = sgRNA Position: 49115427; note = Sequence Name: 56322-704_101_SL_seq_12885
gctccggctccgggtaagcg

SEQ ID NO: 12886 - DNA, 20 bp, Homo sapiens
  source 1..20: mol_type = genomic DNA; note = Gene: VSTM4; note = Location (start to end; relative to TSS): VSTM4_12_42; note = Orientation (relative to transcription): sense; note = sgRNA Position: 49115486; note = Sequence Name: 56322-704_101_SL_seq_12886
cgggcggcggcggggagatg

SEQ ID NO: 12887 - DNA, 20 bp, Homo sapiens
  source 1..20: mol_type = genomic DNA; note = Gene: VSTM4; note = Location (start to end; relative to TSS): VSTM4_63_93; note = Orientation (relative to transcription): antisense; note = sgRNA Position: 49115455; note = Sequence Name: 56322-704_101_SL_seq_12887
cggagcccgcgccagcagcg

SEQ ID NO: 12888 - DNA, 20 bp, Homo sapiens
  source 1..20: mol_type = genomic DNA; note = Gene: VSTM4; note = Location (start to end; relative to TSS): VSTM4_7_37; note = Orientation (relative to transcription): antisense; note = sgRNA Position: 49115511; note = Sequence Name: 56322-704_101_SL_seq_12888
cgccgcccggcgctgtgacg

SEQ ID NO: 12889 - DNA, 20 bp, Homo sapiens
  source 1..20: mol_type = genomic DNA; note = Gene: VSTM4; note = Location (start to end; relative to TSS): VSTM4_48_78; note = Orientation (relative to transcription): sense; note = sgRNA Position: 49115450; note = Sequence Name: 56322-704_101_SL_seq_12889
cggcggccgcgctgctggcg

SEQ ID NO: 12890 - DNA, 20 bp, Homo sapiens
  source 1..20: mol_type = genomic DNA; note = Gene: VSTM5; note = Location (start to end; relative to TSS): VSTM5_46_76; note = Orientation (relative to transcription): sense; note = sgRNA Position: 93850548; note = Sequence Name: 56322-704_101_SL_seq_12890
ataggagctgcagcgcggtg

SEQ ID NO: 12891 - DNA, 20 bp, Homo sapiens
  source 1..20: mol_type = genomic DNA; note = Gene: VSTM5; note = Location (start to end; relative to TSS): VSTM5_91_121; note = Orientation (relative to transcription): sense; note = sgRNA Position: 93850503; note = Sequence Name: 56322-704_101_SL_seq_12891
aggccccgggctcgcccatg

SEQ ID NO: 12892 - DNA, 20 bp, Homo sapiens
  source 1..20: mol_type = genomic DNA; note = Gene: VSTM5; note = Location (start to end; relative to TSS): VSTM5_41_71; note = Orientation (relative to transcription): sense; note = sgRNA Position: 93850553; note = Sequence Name: 56322-704_101_SL_seq_12892
gctgcataggagctgcagcg

SEQ ID NO: 12893 - DNA, 20 bp, Homo sapiens
  source 1..20: mol_type = genomic DNA; note = Gene: VSTM5; note = Location (start to end; relative to TSS): VSTM5_88_118; note = Orientation (relative to transcription): antisense; note = sgRNA Position: 93850526; note = Sequence Name: 56322-704_101_SL_seq_12893
gcccggggcctcgcgggccg

SEQ ID NO: 12894 - DNA, 20 bp, Homo sapiens
  source 1..20: mol_type = genomic DNA; note = Gene: VSTM5; note = Location (start to end; relative to TSS): VSTM5_27_57; note = Orientation (relative to transcription): antisense; note = sgRNA Position: 93850587; note = Sequence Name: 56322-704_101_SL_seq_12894
cttctctcttcctccgcctc

SEQ ID NO: 12895 - DNA, 20 bp, Homo sapiens
  source 1..20: mol_type = genomic DNA; note = Gene: VSTM5; note = Location (start to end; relative to TSS): VSTM5_78_108; note = Orientation (relative to transcription): antisense; note = sgRNA Position: 93850536; note = Sequence Name: 56322-704_101_SL_seq_12895
tcgcgggccggggtgtgtgc

SEQ ID NO: 12896 - DNA, 20 bp, Homo sapiens
  source 1..20: mol_type = genomic DNA; note = Gene: VSTM5; note = Location (start to end; relative to TSS): VSTM5_28_58; note = Orientation (relative to transcription): sense; note = sgRNA Position: 93850566; note = Sequence Name: 56322-704_101_SL_seq_12896
aggaagagagaaggctgcat

SEQ ID NO: 12897 - DNA, 20 bp, Homo sapiens
  source 1..20: mol_type = genomic DNA; note = Gene: VSTM5; note = Location (start to end; relative to TSS): VSTM5_71_101; note = Orientation (relative to transcription): sense; note = sgRNA Position: 93850523; note = Sequence Name: 56322-704_101_SL_seq_12897
agcacacaccccggcccgcg

SEQ ID NO: 12898 - DNA, 20 bp, Homo sapiens
  source 1..20: mol_type = genomic DNA; note = Gene: VSTM5; note = Location (start to end; relative to TSS): VSTM5_17_47; note = Orientation (relative to transcription): antisense; note = sgRNA Position: 93850597; note = Sequence Name: 56322-704_101_SL_seq_12898
cctccgcctctggctgccgc

SEQ ID NO: 12899 - DNA, 20 bp, Homo sapiens
  source 1..20: mol_type = genomic DNA; note = Gene: VSTM5; note = Location (start to end; relative to TSS): VSTM5_62_92; note = Orientation (relative to transcription): sense; note = sgRNA Position: 93850532; note = Sequence Name: 56322-704_101_SL_seq_12899
ggtgcggccagcacacaccc

SEQ ID NO: 12900 - DNA, 20 bp, Homo sapiens
  source 1..20: mol_type = genomic DNA; note = Gene: VTCN1; note = Location (start to end; relative to TSS): VTCN1_44_74; note = Orientation (relative to transcription): antisense; note = sgRNA Position: 117210879; note = Sequence Name: 56322-704_101_SL_seq_12900
ggaaggttcccagcgtatct

SEQ ID NO: 12901 - DNA, 20 bp, Homo sapiens
  source 1..20: mol_type = genomic DNA; note = Gene: VTCN1; note = Location (start to end; relative to TSS): VTCN1_74_104; note = Orientation (relative to transcription): sense; note = sgRNA Position: 117210829; note = Sequence Name: 56322-704_101_SL_seq_12901
tggggcagatcctcttctgg

SEQ ID NO: 12902 - DNA, 20 bp, Homo sapiens
  source 1..20: mol_type = genomic DNA; note = Gene: VTCN1; note = Location (start to end; relative to TSS): VTCN1_38_68; note = Orientation (relative to transcription): antisense; note = sgRNA Position: 117210885; note = Sequence Name: 56322-704_101_SL_seq_12902
ttcccagcgtatctgggtac

SEQ ID NO: 12903 - DNA, 20 bp, Homo sapiens
  source 1..20: mol_type = genomic DNA; note = Gene: VTCN1; note = Location (start to end; relative to TSS): VTCN1_71_101; note = Orientation (relative to transcription): antisense; note = sgRNA Position: 117210852; note = Sequence Name: 56322-704_101_SL_seq_12903
gatctgccccagggaagcca

SEQ ID NO: 12904 - DNA, 20 bp, Homo sapiens
  source 1..20: mol_type = genomic DNA; note = Gene: VTCN1; note = Location (start to end; relative to TSS): VTCN1_30_60; note = Orientation (relative to transcription): antisense; note = sgRNA Position: 117210893; note = Sequence Name: 56322-704_101_SL_seq_12904
gtatctgggtactggctgag

SEQ ID NO: 12905 - DNA, 20 bp, Homo sapiens
  source 1..20: mol_type = genomic DNA; note = Gene: VTCN1; note = Location (start to end; relative to TSS): VTCN1_65_95; note = Orientation (relative to transcription): antisense; note = sgRNA Position: 117210858; note = Sequence Name: 56322-704_101_SL_seq_12905
ccccagggaagccatggctg

SEQ ID NO: 12906 - DNA, 20 bp, Homo sapiens
  source 1..20: mol_type = genomic DNA; note = Gene: VTCN1; note = Location (start to end; relative to TSS): VTCN1_27_57; note = Orientation (relative to transcription): sense; note = sgRNA Position: 117210876; note = Sequence Name: 56322-704_101_SL_seq_12906
agccagtacccagatacgct

SEQ ID NO: 12907 - DNA, 20 bp, Homo sapiens
  source 1..20: mol_type = genomic DNA; note = Gene: VTCN1; note = Location (start to end; relative to TSS): VTCN1_61_91; note = Orientation (relative to transcription): antisense; note = sgRNA Position: 117210862; note = Sequence Name: 56322-704_101_SL_seq_12907
agggaagccatggctgggga

SEQ ID NO: 12908 - DNA, 20 bp, Homo sapiens
  source 1..20: mol_type = genomic DNA; note = Gene: VTCN1; note = Location (start to end; relative to TSS): VTCN1_26_56; note = Orientation (relative to transcription): sense; note = sgRNA Position: 117210877; note = Sequence Name: 56322-704_101_SL_seq_12908
cagccagtacccagatacgc

SEQ ID NO: 12909 - DNA, 20 bp, Homo sapiens
  source 1..20: mol_type = genomic DNA; note = Gene: VTCN1; note = Location (start to end; relative to TSS): VTCN1_56_86; note = Orientation (relative to transcription): sense; note = sgRNA Position: 117210847; note = Sequence Name: 56322-704_101_SL_seq_12909
ccccagccatggcttccctg

SEQ ID NO: 12910 - DNA, 20 bp, Homo sapiens
  source 1..20: mol_type = genomic DNA; note = Gene: WFIKKN1; note = Location (start to end; relative to TSS): WFIKKN1_58_88; note = Orientation (relative to transcription): sense; note = sgRNA Position: 631069; note = Sequence Name: 56322-704_101_SL_seq_12910
gaccccgttacccacccagc

SEQ ID NO: 12911 - DNA, 20 bp, Homo sapiens
  source 1..20: mol_type = genomic DNA; note = Gene: WFIKKN1; note = Location (start to end; relative to TSS): WFIKKN1_98_128; note = Orientation (relative to transcription): sense; note = sgRNA Position: 631109; note = Sequence Name: 56322-704_101_SL_seq_12911
ctgctgcaggcttcagcctc

SEQ ID NO: 12912 - DNA, 20 bp, Homo sapiens
  source 1..20: mol_type = genomic DNA; note = Gene: WFIKKN1; note = Location (start to end; relative to TSS): WFIKKN1_51_81; note = Orientation (relative to transcription): antisense; note = sgRNA Position: 631042; note = Sequence Name: 56322-704_101_SL_seq_12912
cggggtctccaagttctcag

SEQ ID NO: 12913 - DNA, 20 bp, Homo sapiens
  source 1..20: mol_type = genomic DNA; note = Gene: WFIKKN1; note = Location (start to end; relative to TSS): WFIKKN1_81_111; note = Orientation (relative to transcription): antisense; note = sgRNA Position: 631072; note = Sequence Name: 56322-704_101_SL_seq_12913
cttgtcctgacacccctgct

SEQ ID NO: 12914 - DNA, 20 bp, Homo sapiens
  source 1..20: mol_type = genomic DNA; note = Gene: WFIKKN1; note = Location (start to end; relative to TSS): WFIKKN1_33_63; note = Orientation (relative to transcription): antisense; note = sgRNA Position: 631024; note = Sequence Name: 56322-704_101_SL_seq_12914
agaggccgtctgtgtgacgc

SEQ ID NO: 12915 - DNA, 20 bp, Homo sapiens
  source 1..20: mol_type = genomic DNA; note = Gene: WFIKKN1; note = Location (start to end; relative to TSS): WFIKKN1_69_99; note = Orientation (relative to transcription): antisense; note = sgRNA Position: 631060; note = Sequence Name: 56322-704_101_SL_seq_12915
cccctgctgggtgggtaacg

SEQ ID NO: 12916 - DNA, 20 bp, Homo sapiens
  source 1..20: mol_type = genomic DNA; note = Gene: WFIKKN1; note = Location (start to end; relative to TSS): WFIKKN1_34_64; note = Orientation (relative to transcription): sense; note = sgRNA Position: 631045; note = Sequence Name: 56322-704_101_SL_seq_12916
acagacggcctctgagaact

SEQ ID NO: 12917 - DNA, 20 bp, Homo sapiens
  source 1..20: mol_type = genomic DNA; note = Gene: WFIKKN1; note = Location (start to end; relative to TSS): WFIKKN1_67_97; note = Orientation (relative to transcription): sense; note = sgRNA Position: 631078; note = Sequence Name: 56322-704_101_SL_seq_12917
acccacccagcaggggtgtc

SEQ ID NO: 12918 - DNA, 20 bp, Homo sapiens
  source 1..20: mol_type = genomic DNA; note = Gene: WFIKKN1; note = Location (start to end; relative to TSS): WFIKKN1_11_41; note = Orientation (relative to transcription): antisense; note = sgRNA Position: 631002; note = Sequence Name: 56322-704_101_SL_seq_12918
gttcctctccagcttcagcc

SEQ ID NO: 12919 - DNA, 20 bp, Homo sapiens
  source 1..20: mol_type = genomic DNA; note = Gene: WFIKKN1; note = Location (start to end; relative to TSS): WFIKKN1_51_81; note = Orientation (relative to transcription): antisense; note = sgRNA Position: 631042; note = Sequence Name: 56322-704_101_SL_seq_12919
cggggtctccaagttctcag

SEQ ID NO: 12920 - DNA, 20 bp, Homo sapiens
  source 1..20: mol_type = genomic DNA; note = Gene: WFIKKN2; note = Location (start to end; relative to TSS): WFIKKN2_37_67; note = Orientation (relative to transcription): sense; note = sgRNA Position: 50835649; note = Sequence Name: 56322-704_101_SL_seq_12920
cccactcgggtggcgcgccc

SEQ ID NO: 12921 - DNA, 20 bp, Homo sapiens
  source 1..20: mol_type = genomic DNA; note = Gene: WFIKKN2; note = Location (start to end; relative to TSS): WFIKKN2_68_98; note = Orientation (relative to transcription): sense; note = sgRNA Position: 50835680; note = Sequence Name: 56322-704_101_SL_seq_12921
ccgggcgcgggcccctgctg

SEQ ID NO: 12922 - DNA, 20 bp, Homo sapiens
  source 1..20: mol_type = genomic DNA; note = Gene: WFIKKN2; note = Location (start to end; relative to TSS): WFIKKN2_27_57; note = Orientation (relative to transcription): sense; note = sgRNA Position: 50835639; note = Sequence Name: 56322-704_101_SL_seq_12922
ttagctggctcccactcggg

SEQ ID NO: 12923 - DNA, 20 bp, Homo sapiens
  source 1..20: mol_type = genomic DNA; note = Gene: WFIKKN2; note = Location (start to end; relative to TSS): WFIKKN2_63_93; note = Orientation (relative to transcription): antisense; note = sgRNA Position: 50835655; note = Sequence Name: 56322-704_101_SL_seq_12923
cgcgcccggatttatatcct

SEQ ID NO: 12924 - DNA, 20 bp, Homo sapiens
  source 1..20: mol_type = genomic DNA; note = Gene: WFIKKN2; note = Location (start to end; relative to TSS): WFIKKN2_23_53; note = Orientation (relative to transcription): sense; note = sgRNA Position: 50835635; note = Sequence Name: 56322-704_101_SL_seq_12924
caggttagctggctcccact

SEQ ID NO: 12925 - DNA, 20 bp, Homo sapiens
  source 1..20: mol_type = genomic DNA; note = Gene: WFIKKN2; note = Location (start to end; relative to TSS): WFIKKN2_56_86; note = Orientation (relative to transcription): sense; note = sgRNA Position: 50835668; note = Sequence Name: 56322-704_101_SL_seq_12925
caggatataaatccgggcgc

SEQ ID NO: 12926 - DNA, 20 bp, Homo sapiens
  source 1..20: mol_type = genomic DNA; note = Gene: WFIKKN2; note = Location (start to end; relative to TSS): WFIKKN2_24_54; note = Orientation (relative to transcription): sense; note = sgRNA Position: 50835636; note = Sequence Name: 56322-704_101_SL_seq_12926
aggttagctggctcccactc

SEQ ID NO: 12927 - DNA, 20 bp, Homo sapiens
  source 1..20: mol_type = genomic DNA; note = Gene: WFIKKN2; note = Location (start to end; relative to TSS): WFIKKN2_55_85; note = Orientation (relative to transcription): sense; note = sgRNA Position: 50835667; note = Sequence Name: 56322-704_101_SL_seq_12927
ccaggatataaatccgggcg

SEQ ID NO: 12928 - DNA, 20 bp, Homo sapiens
  source 1..20: mol_type = genomic DNA; note = Gene: WFIKKN2; note = Location (start to end; relative to TSS): WFIKKN2_18_48; note = Orientation (relative to transcription): antisense; note = sgRNA Position: 50835610; note = Sequence Name: 56322-704_101_SL_seq_12928
gctaacctgatgcctgtcac

SEQ ID NO: 12929 - DNA, 20 bp, Homo sapiens
  source 1..20: mol_type = genomic DNA; note = Gene: WFIKKN2; note = Location (start to end; relative to TSS): WFIKKN2_49_79; note = Orientation (relative to transcription): sense; note = sgRNA Position: 50835661; note = Sequence Name: 56322-704_101_SL_seq_12929
gcgcgcccaggatataaatc

SEQ ID NO: 12930 - DNA, 20 bp, Homo sapiens
  source 1..20: mol_type = genomic DNA; note = Gene: ZPBP; note = Location (start to end; relative to TSS): ZPBP_41_71; note = Orientation (relative to transcription): sense; note = sgRNA Position: 50093181; note = Sequence Name: 56322-704_101_SL_seq_12930
tggatggaggccttcgccct

SEQ ID NO: 12931 - DNA, 20 bp, Homo sapiens
  source 1..20: mol_type = genomic DNA; note = Gene: ZPBP; note = Location (start to end; relative to TSS): ZPBP_73_103; note = Orientation (relative to transcription): sense; note = sgRNA Position: 50093149; note = Sequence Name: 56322-704_101_SL_seq_12931
gcggggcaggcggcggaccc

SEQ ID NO: 12932 - DNA, 20 bp, Homo sapiens
  source 1..20: mol_type = genomic DNA; note = Gene: ZPBP; note = Location (start to end; relative to TSS): ZPBP_28_58; note = Orientation (relative to transcription): sense; note = sgRNA Position: 50093194; note = Sequence Name: 56322-704_101_SL_seq_12932
cgacggcggcgtgtggatgg

SEQ ID NO: 12933 - DNA, 20 bp, Homo sapiens
  source 1..20: mol_type = genomic DNA; note = Gene: ZPBP; note = Location (start to end; relative to TSS): ZPBP_60_90; note = Orientation (relative to transcription): sense; note = sgRNA Position: 50093162; note = Sequence Name: 56322-704_101_SL_seq_12933
ttggcccagcgcggcggggc

SEQ ID NO: 12934 - DNA, 20 bp, Homo sapiens
  source 1..20: mol_type = genomic DNA; note = Gene: ZPBP; note = Location (start to end; relative to TSS): ZPBP_25_55; note = Orientation (relative to transcription): sense; note = sgRNA Position: 50093197; note = Sequence Name: 56322-704_101_SL_seq_12934
aggcgacggcggcgtgtgga

SEQ ID NO: 12935 - DNA, 20 bp, Homo sapiens
  source 1..20: mol_type = genomic DNA; note = Gene: ZPBP; note = Location (start to end; relative to TSS): ZPBP_56_86; note = Orientation (relative to transcription): sense; note = sgRNA Position: 50093166; note = Sequence Name: 56322-704_101_SL_seq_12935
gcccttggcccagcgcggcg

SEQ ID NO: 12936 - DNA, 20 bp, Homo sapiens
  source 1..20: mol_type = genomic DNA; note = Gene: ZPBP; note = Location (start to end; relative to TSS): ZPBP_21_51; note = Orientation (relative to transcription): sense; note = sgRNA Position: 50093201; note = Sequence Name: 56322-704_101_SL_seq_12936
gggcaggcgacggcggcgtg

SEQ ID NO: 12937 - DNA, 20 bp, Homo sapiens
  source 1..20: mol_type = genomic DNA; note = Gene: ZPBP; note = Location (start to end; relative to TSS): ZPBP_54_84; note = Orientation (relative to transcription): sense; note = sgRNA Position: 50093168; note = Sequence Name: 56322-704_101_SL_seq_12937
tcgcccttggcccagcgcgg

SEQ ID NO: 12938 - DNA, 20 bp, Homo sapiens
  source 1..20: mol_type = genomic DNA; note = Gene: ZPBP; note = Location (start to end; relative to TSS): ZPBP_17_47; note = Orientation (relative to transcription): antisense; note = sgRNA Position: 50093225; note = Sequence Name: 56322-704_101_SL_seq_12938
tcgcctgcccaccgtccgcg

SEQ ID NO: 12939 - DNA, 20 bp, Homo sapiens
  source 1..20: mol_type = genomic DNA; note = Gene: ZPBP; note = Location (start to end; relative to TSS): ZPBP_51_81; note = Orientation (relative to transcription): sense; note = sgRNA Position: 50093171; note = Sequence Name: 56322-704_101_SL_seq_12939
ccttcgcccttggcccagcg

SEQ ID NO: 12940 - DNA, 20 bp, Homo sapiens
  source 1..20: mol_type = genomic DNA; note = Gene: ZPBP2; note = Location (start to end; relative to TSS): ZPBP2_38_68; note = Orientation (relative to transcription): sense; note = sgRNA Position: 39868266; note = Sequence Name: 56322-704_101_SL_seq_12940
cggcgttctgctccgcactg

SEQ ID NO: 12941 - DNA, 20 bp, Homo sapiens
  source 1..20: mol_type = genomic DNA; note = Gene: ZPBP2; note = Location (start to end; relative to TSS): ZPBP2_91_121; note = Orientation (relative to transcription): antisense; note = sgRNA Position: 39868299; note = Sequence Name: 56322-704_101_SL_seq_12941
actccctcctacctcagccc

SEQ ID NO: 12942 - DNA, 20 bp, Homo sapiens
  source 1..20: mol_type = genomic DNA; note = Gene: ZPBP2; note = Location (start to end; relative to TSS): ZPBP2_44_74; note = Orientation (relative to transcription): antisense; note = sgRNA Position: 39868252; note = Sequence Name: 56322-704_101_SL_seq_12942
cagtgcggagcagaacgccg

SEQ ID NO: 12943 - DNA, 20 bp, Homo sapiens
  source 1..20: mol_type = genomic DNA; note = Gene: ZPBP2; note = Location (start to end; relative to TSS): ZPBP2_79_109; note = Orientation (relative to transcription): sense; note = sgRNA Position: 39868307; note = Sequence Name: 56322-704_101_SL_seq_12943
gggccagggctgaggtagga

SEQ ID NO: 12944 - DNA, 20 bp, Homo sapiens
  source 1..20: mol_type = genomic DNA; note = Gene: ZPBP2; note = Location (start to end; relative to TSS): ZPBP2_45_75; note = Orientation (relative to transcription): antisense; note = sgRNA Position: 39868253; note = Sequence Name: 56322-704_101_SL_seq_12944
acagtgcggagcagaacgcc

SEQ ID NO: 12945 - DNA, 20 bp, Homo sapiens
  source 1..20: mol_type = genomic DNA; note = Gene: ZPBP2; note = Location (start to end; relative to TSS): ZPBP2_78_108; note = Orientation (relative to transcription): sense; note = sgRNA Position: 39868306; note = Sequence Name: 56322-704_101_SL_seq_12945
tgggccagggctgaggtagg

SEQ ID NO: 12946 - DNA, 20 bp, Homo sapiens
  source 1..20: mol_type = genomic DNA; note = Gene: ZPBP2; note = Location (start to end; relative to TSS): ZPBP2_41_71; note = Orientation (relative to transcription): sense; note = sgRNA Position: 39868269; note = Sequence Name: 56322-704_101_SL_seq_12946
cgttctgctccgcactgtgg

SEQ ID NO: 12947 - DNA, 20 bp, Homo sapiens
  source 1..20: mol_type = genomic DNA; note = Gene: ZPBP2; note = Location (start to end; relative to TSS): ZPBP2_75_105; note = Orientation (relative to transcription): sense; note = sgRNA Position: 39868303; note = Sequence Name: 56322-704_101_SL_seq_12947
tgttgggccagggctgaggt

SEQ ID NO: 12948 - DNA, 20 bp, Homo sapiens
  source 1..20: mol_type = genomic DNA; note = Gene: ZPBP2; note = Location (start to end; relative to TSS): ZPBP2_18_48; note = Orientation (relative to transcription): sense; note = sgRNA Position: 39868246; note = Sequence Name: 56322-704_101_SL_seq_12948
acgggtaggggaggcgaccc

SEQ ID NO: 12949 - DNA, 20 bp, Homo sapiens
  source 1..20: mol_type = genomic DNA; note = Gene: ZPBP2; note = Location (start to end; relative to TSS): ZPBP2_48_78; note = Orientation (relative to transcription): sense; note = sgRNA Position: 39868276; note = Sequence Name: 56322-704_101_SL_seq_12949
ctccgcactgtggaggaggt

SEQ ID NO: 12950 - protein, 1368 aa, synthetic construct
  source 1..1368: note = Sequence Name: dCas9
MDKKYSIGLAIGTNSVGWAVITDEYKVPSKKFKVLGNTDRHSIKKNLIGALLFDSGETAEATRLKRTARRRYTRRKNRICYLQEIFSNEMAKVDDSFFHRLEESFLVEEDKKHERHPIFGNIVDEVAYHEKYPTIYHLRKKLVDSTDKADLRLIYLALAHMIKFRGHFLIEGDLNPDNSDVDKLFIQLVQTYNQLFEENPINASGVDAKAILSARLSKSRRLENLIAQLPGEKKNGLFGNLIALSLGLTPNFKSNFDLAEDAKLQLSKDTYDDDLDNLLAQIGDQYADLFLAAKNLSDAILLSDILRVNTEITKAPLSASMIKRYDEHHQDLTLLKALVRQQLPEKYKEIFFDQSKNGYAGYIDGGASQEEFYKFIKPILEKMDGTEELLVKLNREDLLRKQRTFDNGSIPHQIHLGELHAILRRQEDFYPFLKDNREKIEKILTFRIPYYVGPLARGNSRFAWMTRKSEETITPWNFEEVVDKGASAQSFIERMTNFDKNLPNEKVLPKHSLLYEYFTVYNELTKVKYVTEGMRKPAFLSGEQKKAIVDLLFKTNRKVTVKQLKEDYFKKIECFDSVEISGVEDRFNASLGTYHDLLKIIKDKDFLDNEENEDILEDIVLTLTLFEDREMIEERLKTYAHLFDDKVMKQLKRRRYTGWGRLSRKLINGIRDKQSGKTILDFLKSDGFANRNFMQLIHDDSLTFKEDIQKAQVSGQGDSLHEHIANLAGSPAIKKGILQTVKVVDELVKVMGRHKPENIVIEMARENQTTQKGQKNSRERMKRIEEGIKELGSQILKEHPVENTQLQNEKLYLYYLQNGRDMYVDQELDINRLSDYDVDAIVPQSFLKDDSIDNKVLTRSDKNRGKSDNVPSEEVVKKMKNYWRQLLNAKLITQRKFDNLTKAERGGLSELDKAGFIKRQLVETRQITKHVAQILDSRMNTKYDENDKLIREVKVITLKSKLVSDFRKDFQFYKVREINNYHHAHDAYLNAVVGTALIKKYPKLESEFVYGDYKVYDVRKMIAKSEQEIGKATAKYFFYSNIMNFFKTEITLANGEIRKRPLIETNGETGEIVWDKGRDFATVRKVLSMPQVNIVKKTEVQTGGFSKESILPKRNSDKLIARKKDWDPKKYGGFDSPTVAYSVLVVAKVEKGKSKKLKSVKELLGITIMERSSFEKNPIDFLEAKGYKEVKKDLIIKLPKYSLFELENGRKRMLASAGELQKGNELALPSKYVNFLYLASHYEKLKGSPEDNEQKQLFVEQHKHYLDEIIEQISEFSKRVILADANLDKVLSAYNKHRDKPIREQAENIIHLFTLTNLGAPAAFKYFDTTIDRKRYTSTKEVLDATLIHQSITGLYETRIDLSQLGGD

SEQ ID NO: 12951 - protein, 1307 aa, synthetic construct
  source 1..1307: note = Sequence Name: dCas12a
MTQFEGFTNLYQVSKTLRFELIPQGKTLKHIQEQGFIEEDKARNDHYKELKPIIDRIYKTYADQCLQLVQLDWENLSAAIDSYRKEKTEETRNALIEEQATYRNAIHDYFIGRTDNLTDAINKRHAEIYKGLFKAELFNGKVLKQLGTVTTTEHENALLRSFDKFTTYFSGFYENRKNVFSAEDISTAIPHRIVQDNFPKFKENCHIFTRLITAVPSLREHFENVKKAIGIFVSTSIEEVFSFPFYNQLLTQTQIDLYNQLLGGISREAGTEKIKGLNEVLNLAIQKNDETAHIIASLPHRFIPLFKQILSDRNTLSFILEEFKSDEEVIQSFCKYKTLLRNENVLETAEALFNELNSIDLTHIFISHKKLETISSALCDHWDTLRNALYERRISELTGKITKSAKEKVQRSLKHEDINLQEIISAAGKELSEAFKQKTSEILSHAHAALDQPLPTTLKKQEEKEILKSQLDSLLGLYHLLDWFAVDESNEVDPEFSARLTGIKLEMEPSLSFYNKARNYATKKPYSVEKFKLNFQMPTLASGWDVNKEKNNGAILFVKNGLYYLGIMPKQKGRYKALSFEPTEKTSEGFDKMYYDYFPDAAKMIPKCSTQLKAVTAHFQTHTTPILLSNNFIEPLEITKEIYDLNNPEKEPKKFQTAYAKKTGDQKGYREALCKWIDFTRDFLSKYTKTTSIDLSSLRPSSQYKDLGEYYAELNPLLYHISFQRIAEKEIMDAVETGKLYLFQIYNKDFAKGHHGKPNLHTLYWTGLFSPENLAKTSIKLNGQAELFYRPKSRMKRMAHRLGEKMLNKKLKDQKTPIPDTLYQELYDYVNHRLSHDLSDEARALLPNVITKEVSHEIIKDRRFTSDKFFFHVPITLNYQAANSPSKFNQRVNAYLKEHPETPIIGIDRGERNLIYITVIDSTGKILEQRSLNTIQQFDYQKKLDNREKERVAARQAWSVVGTIKDLKQGYLSQVIHEIVDLMIHYQAVVVLANLNFGFKSKRTGIAEKAVYQQFEKMLIDKLNCLVLKDYPAEKVGGVLNPYQLTDQFTSFAKMGTQSGFLFYVPAPYTSKIDPLTGFVDPFVWKTIKNHESRKHFLEGFDFLHYDVKTGDFILHFKMNRNLSFQRGLPGFMPAWDIVFEKNETQFDAKGTPFIAGKRIVPVIENHRFTGRYRDLYPANELIALLEEKGIVFRDGSNILPKLLENDDSHAIDTMVALIRSVLQMRNSNAATGEDYINSPVRDLNGVCFDSRFQNPEWPMDADANGAYHIALKGQLLLNHLKESKDLKLQNGISNQDWLAYIQELRN

SEQ ID NO: 12952 - protein, 529 aa, synthetic construct
  source 1..529: note = Sequence Name: dCas12f1
MAKNTITKTLKLRIVRPYNSAEVEKIVADEKNNREKIALEKNKDKVKEACSKHLKVAAYCTTQVERNACLFCKARKLDDKFYQKLRGQFPDAVFWQEISEIFRQLQKQAAEIYNQSLIELYYEIFIKGKGIANASSVEHYLSDVCYTRAAELFKNAAIASGLRSKIKSNFRLKELKNMKSGLPTTKSDNFPIPLVKQKGGQYTGFEISNHNSDFIIKIPFGRWQVKKEIDKYRPWEKFDFEQVQKSPKPISLLLSTQRRKRNKGWSKDEGTEAEIKKVMNGDYQTSYIEVKRGSKICEKSAWMLNLSIDVPKIDKGVDPSIIGGIAVGVKSPLVCAINNAFSRYSISDNDLFHFNKKMFARRRILLKKNRHKRAGHGAKNKLKPITILTEKSERFRKKLIERWACEIADFFIKNKVGTVQMENLESMKRKEDSYFNIRLRGFWPYAEMQNKIEFKLKQYGIEIRKVAPNNTSKTCSKCGHLNNYFNFEYRKKNKFPHFKCEKCNFKENAAYNAALNISNPKLKSTKEEP

SEQ ID NO: 12953 - protein, 529 aa, synthetic construct
  source 1..529: note = Sequence Name: dCasMINI
MAKNTITKTLKLRIVRPYNSAEVEKIVADEKNNREKIALEKNKDKVKEACSKHLKVAAYCTTQVERNACLFCKARKLDDKFYQKLRGQFPDAVFWQEISEIFRQLQKQAAEIYNQSLIELYYEIFIKGKGIANASSVEHYLSRVCYRRAAELFKNAAIASGLRSKIKSNFRLKELKNMKSGLPTTKSDNFPIPLVKQKGGQYTGFEISNHNSDFIIKIPFGRWQVKKEIDKYRPWEKFDFEQVQKSPKPISLLLSTQRRKRNKGWSKDEGTEAEIKKVMNGDYQTSYIEVKRGSKICEKSAWMLNLSIDVPKIDKGVDPSIIGGIAVGVRSPLVCAINNAFSRYSISDNDLFHFNKKMFARRRILLKKNRHKRAGHGAKNKLKPITILTEKSERFRKKLIERWACEIADFFIKNKVGTVQMENLESMKRKEDSYFNIRLRGFWPYAEMQNKIEFKLKQYGIEIRKVAPNNTSKTCSKCGHLNNYFNFEYRKKNKFPHFKCEKCNFKENAAYNAALNISNPKLKSTKERP

SEQ ID NO: 12954 - protein, 16 aa, synthetic construct
  source 1..16: note = Sequence Name: Linker
YPTFLYKVVGGSGGSA

SEQ ID NO: 12955 - protein, 7 aa, synthetic construct
  source 1..7: note = Sequence Name: SV40NLS_56322-704_101_SL_seq_12955
PKKKRKV

SEQ ID NO: 12956 - protein, 8 aa, synthetic construct
  source 1..8: note = Sequence Name: SV40NLS_56322-704_101_SL_seq_12956
PKKKRKVD

SEQ ID NO: 12957 - protein, 8 aa, synthetic construct
  source 1..8: note = Sequence Name: SV40NLS_56322-704_101_SL_seq_12957
PKKKRKVG

SEQ ID NO: 12958 - protein, 24 aa, synthetic construct
  source 1..24: note = Sequence Name: Triple SV40 NLS
PKKKRKVDPKKKRKVDPKKKRKVG

SEQ ID NO: 12959 - protein, 16 aa, synthetic construct
  source 1..16: note = Sequence Name: Nucleoplasmin NLS
KRPAATKKAGQAKKKK

SEQ ID NO: 12960 - protein, 18 aa, synthetic construct
  source 1..18: note = Sequence Name: T2A peptide
EGRGSLLTCGDVEENPGP

SEQ ID NO: 12961 - DNA, 227 bp, synthetic construct
  source 1..227: mol_type = other DNA; note = Sequence Name: RSV promoter
tgtagtcttatgcaatactcttgtagtcttgcaacatggtaacgatgagttagcaacatgccttacaaggagagaaaaagcaccgtgcatgccgattggtggaagtaaggtggtacgatcgtgccttattaggaaggcaacagacgggtctgacatggattggacgaaccactgaattgccgcattgcagagatattgtatttaagtgcctagctcgatacataaac

SEQ ID NO: 12962 - DNA, 227 bp, synthetic construct; identical to SEQ ID NO: 12961
  source 1..227: mol_type = other DNA; note = Sequence Name: Truncated 5' LTR

SEQ ID NO: 12963 - DNA, 250 bp, Homo sapiens
  source 1..250: mol_type = genomic DNA; note = Sequence Name: Human U6 promoter - full length
gagggcctatttcccatgattccttcatatttgcatatacgatacaaggctgttagagagataattggaattaatttgactgtaaacacaaagatattagtacaaaatacgtgacgtagaaagtaataatttcttgggtagtttgcagttttaaaattatgttttaaaatggactatcatatgcttaccgtaacttgaaagtatttcgatttcttggctttatatatcttgtggaaaggacgaaacaccg

SEQ ID NO: 12964 - DNA, 112 bp, Homo sapiens
  source 1..112: mol_type = genomic DNA; note = Sequence Name: Human U6 promoter - minimum
gagggcctatttcccatgattccttcatatttgcatatacgatagcttaccgtaacttgaaagtatttcgatttcttggctttatatatcttgtggaaaggacgaaacaccg

SEQ ID NO: 12965 - DNA, 100 bp, synthetic construct
  source 1..100: mol_type = other DNA; note = Sequence Name: minimal compound pol-III promoter M11
atatttagcatgtcgctatgtgttctgggaaacttgacctaagtgtaaagttgagatttccttcaggtttatatagttctgtatgagaccactctttccc

SEQ ID NO: 12966 - DNA, 88 bp, synthetic construct
  source 1..88: mol_type = other DNA; note = Sequence Name: tracrRNA-1
gtttgagagctaagcagaaagctgcatagcaagttcaaataaggctagtccgtacacaacttgaaaaagtggcagccgagtcggctgc

SEQ ID NO: 12967 - DNA, 94 bp, synthetic construct
  source 1..94: mol_type = other DNA; note = Sequence Name: tracrRNA-1 iBAR
  misc_difference 20..25: note = a, c, t, g, unknown or other
gtttgagagctaagcagaannnnnnagctgcatagcaagttcaaataaggctagtccgtacacaacttgaaaaagtggcagccgagtcggctgc

SEQ ID NO: 12968 - DNA, 96 bp, synthetic construct
  source 1..96: mol_type = other DNA; note = Sequence Name: tracrRNA-2
gtttcagagctaagcacaagagtgcatagcaagttgaaataaggctagtccgtttacaacttggacttcggtccaagtggcacccgagtcgggtgc

SEQ ID NO: 12969 - DNA, 86 bp, synthetic construct
  source 1..86: mol_type = other DNA; note = Sequence Name: tracrRNA-3
gtttaagagctatgctggaaacagcatagcaagtttaaataaggctagtccgttatcaacttgaaaaagtggcaccgagtcggtgc

SEQ ID NO: 12970 - DNA, 400 bp, Homo sapiens
  source 1..400: mol_type = genomic DNA; note = Sequence Name: UbiC promoter
ggcctccgcgccgggttttggcgcctcccgcgggcgcccccctcctcacggcgagcgctgccacgtcagacgaagggcgcagcgagcgtcctgatccttccgcccggacgctcaggacagcggcccgctgctcataagactcggccttagaaccccagtatcagcagaaggacattttaggacgggacttgggtgactctagggcactggttttctttccagagagcggaacaggcgaggaaaagtagtcccttctcggcgattctgcggagggatctccgtggggcggtgaacgccgatgattatataaggacgcgccgggtgtggcacagctagttccgtcgcagccgggatttgggtcgcggttcttgtttgtggatcgctgtgatcgtcacttggt

SEQ ID NO: 12971 - DNA, 54 bp, synthetic construct
  source 1..54: mol_type = other DNA; note = Sequence Name: T2A
gagggcagaggaagccttctaacatgcggtgacgtggaggagaatcccggccct

SEQ ID NO: 12972 - DNA, 66 bp, synthetic construct
  source 1..66: mol_type = other DNA; note = Sequence Name: T2A-with linkers
ggatccgagggcagaggaagccttctaacatgcggtgacgtggaggagaatcccggccctcccggg

SEQ ID NO: 12973 - DNA, 489 bp, synthetic construct
  source 1..489: mol_type = other DNA; note = Sequence Name: Thy1 marker sequence
atgaacccagccatcagcgtcgctctcctgctctcagtcttgcaggtgtcccgagggcagaaggtgaccagcctgacagcctgcctggtgaaccaaaaccttcgcctggactgccgccatgagaataacaccaaggataactccatccagcatgagttcagcctgacccgagagaagaggaagcacgtgctctcaggcaccctcgggatacccgagcacacgtaccgctcccgcgtcaccctctccaaccagccctatatcaaggtccttaccctagccaacttcaccaccaaggatgagggcgactacttttgtgagcttcgagtctcgggcgcgaatcccatgagctccaataaaagtatcagtgtgtatagagacaaactggtcaagtgtggcggcataagcctgctggttcagaacacatcctggatgctgctgctgctgctttccctctccctcctccaagccctggacttcatttctctgtga

SEQ ID NO: 12974 - DNA, 234 bp, synthetic construct
  source 1..234: mol_type = other DNA; note = Sequence Name: 3' LTR
tggaagggctaattcactcccaacgaagataagatctgctttttgcttgtactgggtctctctggttagaccagatctgagcctgggagctctctggctaactagggaacccactgcttaagcctcaataaagcttgccttgagtgcttcaagtagtgtgtgcccgtctgttgtgtgactctggtaactagagatccctcagacccttttagtcagtgtggaaaatctctagca

SEQ ID NO: 12975 - DNA, 122 bp, synthetic construct
  source 1..122: mol_type = other DNA; note = Sequence Name: SV40 polyadenylation signal
aacttgtttattgcagcttataatggttacaaataaagcaatagcatcacaaatttcacaaataaagcatttttttcactgcattctagttgtggtttgtccaaactcatcaatgtatctta

SEQ ID NO: 12976 - DNA, 589 bp, synthetic construct
  source 1..589: mol_type = other DNA; note = Sequence Name: Ori sequence
tttccataggctccgcccccctgacgagcatcacaaaaatcgacgctcaagtcagaggtggcgaaacccgacaggactataaagataccaggcgtttccccctggaagctccctcgtgcgctctcctgttccgaccctgccgcttaccggatacctgtccgcctttctcccttcgggaagcgtggcgctttctcatagctcacgctgtaggtatctcagttcggtgtaggtcgttcgctccaagctgggctgtgtgcacgaaccccccgttcagcccgaccgctgcgccttatccggtaactatcgtcttgagtccaacccggtaagacacgacttatcgccactggcagcagccactggtaacaggattagcagagcgaggtatgtaggcggtgctacagagttcttgaagtggtggcctaactacggctacactagaagaacagtatttggtatctgcgctctgctgaagccagttaccttcggaaaaagagttggtagctcttgatccggcaaacaaaccaccgctggtagcggtggtttttttgtttgcaagcagcagattacgcgcagaaaaaaaggatctcaa

SEQ ID NO: 12977 - DNA, 861 bp, synthetic construct
  source 1..861: mol_type = other DNA; note = Sequence Name: AmpR
atgagtattcaacatttccgtgtcgcccttattcccttttttgcggcattttgccttcctgtttttgctcacccagaaacgctggtgaaagtaaaagatgctgaagatcagttgggtgcacgagtgggttacatcgaactggatctcaacagcggtaagatccttgagagttttcgccccgaagaacgttttccaatgatgagcacttttaaagttctgctatgtggcgcggtattatcccgtattgacgccgggcaagagcaactcggtcgccgcatacactattctcagaatgacttggttgagtactcaccagtcacagaaaagcatcttacggatggcatgacagtaagagaattatgcagtgctgccataaccatgagtgataacactgcggccaacttacttctgacaacgatcggaggaccgaaggagctaaccgcttttttgcacaacatgggggatcatgtaactcgccttgatcgttgggaaccggagctgaatgaagccataccaaacgacgagcgtgacaccacgatgcctgtagcaatggcaacaacgttgcgcaaactattaactggcgaactacttactctagcttcccggcaacaattaatagactggatggaggcggataaagttgcaggaccacttctgcgctcggcccttccggctggctggtttattgctgataaatctggagccggtgagcgtgggtctcgcggtatcattgcagcactggggccagatggtaagccctcccgtatcgtagttatctacacgacggggagtcaggcaactatggatgaacgaaatagacagatcgctgagataggtgcctcactgattaagcattggtaa

SEQ ID NO: 12978 - DNA, 105 bp, synthetic construct
  source 1..105: mol_type = other DNA; note = Sequence Name: AmpR promoter
cgcggaacccctatttgtttatttttctaaatacattcaaatatgtatccgctcatgagacaataaccctgataaatgcttcaataatattgaaaaaggaagagt

SEQ ID NO: 12979 - DNA, 89 bp, synthetic construct
  source 1..89: mol_type = other DNA; note = Sequence Name: i7 index binding site - Random Sequence Label
  misc_difference 34..43: note = a, c, t, g, unknown or other
gatcggaagagcacacgtctgaactccagtcacnnnnnnnnnngctagcaaggtccctatagtgagtcgtattagaattggcgcgccaa

SEQ ID NO: 12980 - DNA, 116 bp, synthetic construct
  source 1..116: mol_type = other DNA; note = Sequence Name: central polypurine tract and central termination sequence of HIV-1
tttaaaagaaaaggggggattggggggtacagtgcaggggaaagaatagtagacataatagcaacagacatacaaactaaagaattacaaaaacaaattacaaaaattcaaaattt

SEQ ID NO: 12981 - DNA, 71 bp, synthetic construct
  source 1..71: mol_type = other DNA; note = Sequence Name: 3X-SV40 NLS nucleotide
ccaaaaaagaagagaaaggtagatcctaagaaaaagcgtaaggttgatccaaagaagaaaaggaaagtggg
